United States Patent Application Publication US 2025/0228976 A1 - sequence listing, part 2

SEQ ID NO: 28418 - DNA, 21 bp, synthetic construct
  source 1..21: mol_type = other DNA; mol_type = other DNA
tgtaaaccattcacaagagaa

SEQ ID NO: 28419 - DNA, 21 bp, synthetic construct
  source 1..21: mol_type = other DNA; mol_type = other DNA
tatactagactgaatcaaaac

SEQ ID NO: 28420 - DNA, 21 bp, synthetic construct
  source 1..21: mol_type = other DNA; mol_type = other DNA
aaggatggctactccgtgtat

SEQ ID NO: 28421 - DNA, 21 bp, synthetic construct
  source 1..21: mol_type = other DNA; mol_type = other DNA
gattatgcatatagcagggaa

SEQ ID NO: 28422 - DNA, 21 bp, synthetic construct
  source 1..21: mol_type = other DNA; mol_type = other DNA
tatgctagagggggggctaat

SEQ ID NO: 28423 - DNA, 21 bp, synthetic construct
  source 1..21: mol_type = other DNA; mol_type = other DNA
ctacgcgacggaaccccgtcc

SEQ ID NO: 28424 - DNA, 21 bp, synthetic construct
  source 1..21: mol_type = other DNA; mol_type = other DNA
tattcgaggttatcaattgac

SEQ ID NO: 28425 - DNA, 21 bp, synthetic construct
  source 1..21: mol_type = other DNA; mol_type = other DNA
aagtacgaccatgtagcgtgg

SEQ ID NO: 28426 - DNA, 21 bp, synthetic construct
  source 1..21: mol_type = other DNA; mol_type = other DNA
tactctaagtctaaccacaac

SEQ ID NO: 28427 - DNA, 21 bp, synthetic construct
  source 1..21: mol_type = other DNA; mol_type = other DNA
attatgggtgataggacatgg

SEQ ID NO: 28428 - DNA, 21 bp, synthetic construct
  source 1..21: mol_type = other DNA; mol_type = other DNA
agagatgaatttgtgggctat

SEQ ID NO: 28429 - DNA, 21 bp, synthetic construct
  source 1..21: mol_type = other DNA; mol_type = other DNA
tatgctagaactaatgataat

SEQ ID NO: 28430 - DNA, 21 bp, synthetic construct
  source 1..21: mol_type = other DNA; mol_type = other DNA
tacagtagagcaggtgacaac

SEQ ID NO: 28431 - DNA, 21 bp, synthetic construct
  source 1..21: mol_type = other DNA; mol_type = other DNA
agcctagcagacagaaaatgg

SEQ ID NO: 28432 - DNA, 21 bp, synthetic construct
  source 1..21: mol_type = other DNA; mol_type = other DNA
tacgctaagtacgggcccaat

SEQ ID NO: 28433 - DNA, 21 bp, synthetic construct
  source 1..21: mol_type = other DNA; mol_type = other DNA
tacagcaaacaaggttggaat

SEQ ID NO: 28434 - DNA, 21 bp, synthetic construct
  source 1..21: mol_type = other DNA; mol_type = other DNA
aacgggatcaacggtagatgg

SEQ ID NO: 28435 - DNA, 21 bp, synthetic construct
  source 1..21: mol_type = other DNA; mol_type = other DNA
ttcttcagtggacgcgtagaa

SEQ ID NO: 28436 - DNA, 21 bp, synthetic construct
  source 1..21: mol_type = other DNA; mol_type = other DNA
ctacacaggctctcagaatat

SEQ ID NO: 28437 - DNA, 21 bp, synthetic construct
  source 1..21: mol_type = other DNA; mol_type = other DNA
ttttgtagtaccaacggagtc

SEQ ID NO: 28438 - DNA, 21 bp, synthetic construct
  source 1..21: mol_type = other DNA; mol_type = other DNA
ttccacaggctcagtacgaat

SEQ ID NO: 28439 - DNA, 21 bp, synthetic construct
  source 1..21: mol_type = other DNA; mol_type = other DNA
tacttcactgggcaaacaatg

SEQ ID NO: 28440 - DNA, 21 bp, synthetic construct
  source 1..21: mol_type = other DNA; mol_type = other DNA
tatcacgcgttaaatctcgac

SEQ ID NO: 28441 - DNA, 21 bp, synthetic construct
  source 1..21: mol_type = other DNA; mol_type = other DNA
tatagccgcattggagggaat

SEQ ID NO: 28442 - DNA, 21 bp, synthetic construct
  source 1..21: mol_type = other DNA; mol_type = other DNA
tactttacaggtacagtcaaa

SEQ ID NO: 28443 - DNA, 21 bp, synthetic construct
  source 1..21: mol_type = other DNA; mol_type = other DNA
attatgcaggaccgtgcatgg

SEQ ID NO: 28444 - DNA, 21 bp, synthetic construct
  source 1..21: mol_type = other DNA; mol_type = other DNA
tatgccaggaacggtacgaat

SEQ ID NO: 28445 - DNA, 21 bp, synthetic construct
  source 1..21: mol_type = other DNA; mol_type = other DNA
tattggaccggaatggtagac

SEQ ID NO: 28446 - DNA, 21 bp, synthetic construct
  source 1..21: mol_type = other DNA; mol_type = other DNA
gatatggcgtccagaatgtgg

SEQ ID NO: 28447 - DNA, 21 bp, synthetic construct
  source 1..21: mol_type = other DNA; mol_type = other DNA
cgcactgaattcgaggggtac

SEQ ID NO: 28448 - DNA, 21 bp, synthetic construct
  source 1..21: mol_type = other DNA; mol_type = other DNA
tttttcagtggtgtaaaagac

SEQ ID NO: 28449 - DNA, 21 bp, synthetic construct
  source 1..21: mol_type = other DNA; mol_type = other DNA
tgtgatgcagagatgcgagag

SEQ ID NO: 28450 - DNA, 21 bp, synthetic construct
  source 1..21: mol_type = other DNA; mol_type = other DNA
tactggtcagggttattggat

SEQ ID NO: 28451 - DNA, 21 bp, synthetic construct
  source 1..21: mol_type = other DNA; mol_type = other DNA
tactttcatggtaaacaggag

SEQ ID NO: 28452 - DNA, 21 bp, synthetic construct
  source 1..21: mol_type = other DNA; mol_type = other DNA
tacttcgcgggccggttcgac

SEQ ID NO: 28453 - DNA, 21 bp, synthetic construct
  source 1..21: mol_type = other DNA; mol_type = other DNA
aaggacggctattcgctatat

SEQ ID NO: 28454 - DNA, 21 bp, synthetic construct
  source 1..21: mol_type = other DNA; mol_type = other DNA
cgagactacgacgcatttcct

SEQ ID NO: 28455 - DNA, 21 bp, synthetic construct
  source 1..21: mol_type = other DNA; mol_type = other DNA
tatgcaagaagtgggatgaat

SEQ ID NO: 28456 - DNA, 21 bp, synthetic construct
  source 1..21: mol_type = other DNA; mol_type = other DNA
ttgagtaaagtggggcccgat

SEQ ID NO: 28457 - DNA, 21 bp, synthetic construct
  source 1..21: mol_type = other DNA; mol_type = other DNA
tacgctaaaacgggaggcaat

SEQ ID NO: 28458 - DNA, 21 bp, synthetic construct
  source 1..21: mol_type = other DNA; mol_type = other DNA
tatgctcgtgggggcctgaat

SEQ ID NO: 28459 - DNA, 21 bp, synthetic construct
  source 1..21: mol_type = other DNA; mol_type = other DNA
tacttcagcggcatgaggtct

SEQ ID NO: 28460 - DNA, 21 bp, synthetic construct
  source 1..21: mol_type = other DNA; mol_type = other DNA
cgaggcgagtcacacggatgg

SEQ ID NO: 28461 - DNA, 21 bp, synthetic construct
  source 1..21: mol_type = other DNA; mol_type = other DNA
tggtacagcggcataaaggag

SEQ ID NO: 28462 - DNA, 21 bp, synthetic construct
  source 1..21: mol_type = other DNA; mol_type = other DNA
accgacgactggtcaagttat

SEQ ID NO: 28463 - DNA, 21 bp, synthetic construct
  source 1..21: mol_type = other DNA; mol_type = other DNA
tgcatgccgtgtactccgtgt

SEQ ID NO: 28464 - DNA, 21 bp, synthetic construct
  source 1..21: mol_type = other DNA; mol_type = other DNA
tgcggtccaggctgctgtgaa

SEQ ID NO: 28465 - DNA, 21 bp, synthetic construct
  source 1..21: mol_type = other DNA; mol_type = other DNA
gcagacggtgtcagtaaatgg

SEQ ID NO: 28466 - DNA, 21 bp, synthetic construct
  source 1..21: mol_type = other DNA; mol_type = other DNA
tatttttcgggcataccaatg

SEQ ID NO: 28467 - DNA, 21 bp, synthetic construct
  source 1..21: mol_type = other DNA; mol_type = other DNA
tattggagtggaatacccgag

SEQ ID NO: 28468 - DNA, 21 bp, synthetic construct
  source 1..21: mol_type = other DNA; mol_type = other DNA
aaggacgggtatagtgtgtgg

SEQ ID NO: 28469 - DNA, 21 bp, synthetic construct
  source 1..21: mol_type = other DNA; mol_type = other DNA
tggtggagcggtattacagac

SEQ ID NO: 28470 - DNA, 21 bp, synthetic construct
  source 1..21: mol_type = other DNA; mol_type = other DNA
tatttcaccggacggactgat

SEQ ID NO: 28471 - DNA, 21 bp, synthetic construct
  source 1..21: mol_type = other DNA; mol_type = other DNA
tactccagattgaacgcgaat

SEQ ID NO: 28472 - DNA, 21 bp, synthetic construct
  source 1..21: mol_type = other DNA; mol_type = other DNA
ctgtccaagtcagcgtataac

SEQ ID NO: 28473 - DNA, 21 bp, synthetic construct
  source 1..21: mol_type = other DNA; mol_type = other DNA
tacgctagaacaggtggcaac

SEQ ID NO: 28474 - DNA, 21 bp, synthetic construct
  source 1..21: mol_type = other DNA; mol_type = other DNA
cgaacctacgacgcttttgca

SEQ ID NO: 28475 - DNA, 21 bp, synthetic construct
  source 1..21: mol_type = other DNA; mol_type = other DNA
tattcgcgggccaatgagaat

SEQ ID NO: 28476 - DNA, 21 bp, synthetic construct
  source 1..21: mol_type = other DNA; mol_type = other DNA
tactcgaaaggaaacttcaac

SEQ ID NO: 28477 - DNA, 21 bp, synthetic construct
  source 1..21: mol_type = other DNA; mol_type = other DNA
tactttagtggagtaagcatg

SEQ ID NO: 28478 - DNA, 21 bp, synthetic construct
  source 1..21: mol_type = other DNA; mol_type = other DNA
catcagagcacgaatgggatt

SEQ ID NO: 28479 - DNA, 21 bp, synthetic construct
  source 1..21: mol_type = other DNA; mol_type = other DNA
tactcgcgggtgggcttaaat

SEQ ID NO: 28480 - DNA, 21 bp, synthetic construct
  source 1..21: mol_type = other DNA; mol_type = other DNA
ggctgtcggccgcaagctggc

SEQ ID NO: 28481 - DNA, 21 bp, synthetic construct
  source 1..21: mol_type = other DNA; mol_type = other DNA
tatttcagcgggactgtgatg

SEQ ID NO: 28482 - DNA, 21 bp, synthetic construct
  source 1..21: mol_type = other DNA; mol_type = other DNA
cgggatgagtttaaaagctat

SEQ ID NO: 28483 - DNA, 21 bp, synthetic construct
  source 1..21: mol_type = other DNA; mol_type = other DNA
ttttggtcgggaatcgtggaa

SEQ ID NO: 28484 - DNA, 21 bp, synthetic construct
  source 1..21: mol_type = other DNA; mol_type = other DNA
taccatcgattgagccaggat

SEQ ID NO: 28485 - DNA, 21 bp, synthetic construct
  source 1..21: mol_type = other DNA; mol_type = other DNA
ccatatgctaggtctgtcgat

SEQ ID NO: 28486 - DNA, 21 bp, synthetic construct
  source 1..21: mol_type = other DNA; mol_type = other DNA
tactcgaaaaatgggtacaac

SEQ ID NO: 28487 - DNA, 21 bp, synthetic construct
  source 1..21: mol_type = other DNA; mol_type = other DNA
ttttttagtggggtaaaagac

SEQ ID NO: 28488 - DNA, 21 bp, synthetic construct
  source 1..21: mol_type = other DNA; mol_type = other DNA
tattttagtggagtgcatcag

SEQ ID NO: 28489 - DNA, 21 bp, synthetic construct
  source 1..21: mol_type = other DNA; mol_type = other DNA
tatcaccgactcagcgaaatg

SEQ ID NO: 28490 - DNA, 21 bp, synthetic construct
  source 1..21: mol_type = other DNA; mol_type = other DNA
tactggagtggtttaaaggag

SEQ ID NO: 28491 - DNA, 21 bp, synthetic construct
  source 1..21: mol_type = other DNA; mol_type = other DNA
agaacatttgactcatacgca

SEQ ID NO: 28492 - DNA, 21 bp, synthetic construct
  source 1..21: mol_type = other DNA; mol_type = other DNA
tactcacgagtcggaactaac

SEQ ID NO: 28493 - DNA, 21 bp, synthetic construct
  source 1..21: mol_type = other DNA; mol_type = other DNA
tgcaagccgcgcatgctcgag

SEQ ID NO: 28494 - DNA, 21 bp, synthetic construct
  source 1..21: mol_type = other DNA; mol_type = other DNA
ttggctcggaacgcaagcaac

SEQ ID NO: 28495 - DNA, 21 bp, synthetic construct
  source 1..21: mol_type = other DNA; mol_type = other DNA
tatttcaccggctatactgag

SEQ ID NO: 28496 - DNA, 21 bp, synthetic construct
  source 1..21: mol_type = other DNA; mol_type = other DNA
atgtgggatggaacctcgcct

SEQ ID NO: 28497 - DNA, 21 bp, synthetic construct
  source 1..21: mol_type = other DNA; mol_type = other DNA
tactttagccagattaaagag

SEQ ID NO: 28498 - DNA, 21 bp, synthetic construct
  source 1..21: mol_type = other DNA; mol_type = other DNA
ctttgggacggcacgatgtct

SEQ ID NO: 28499 - DNA, 21 bp, synthetic construct
  source 1..21: mol_type = other DNA; mol_type = other DNA
tactactcgggaatcataagt

SEQ ID NO: 28500 - DNA, 21 bp, synthetic construct
  source 1..21: mol_type = other DNA; mol_type = other DNA
tgcaagcctcctagtgacatg

SEQ ID NO: 28501 - DNA, 21 bp, synthetic construct
  source 1..21: mol_type = other DNA; mol_type = other DNA
tttagccgcgtggggcaaaat

SEQ ID NO: 28502 - DNA, 21 bp, synthetic construct
  source 1..21: mol_type = other DNA; mol_type = other DNA
ttatgtaatccatgcttgacg

SEQ ID NO: 28503 - DNA, 21 bp, synthetic construct
  source 1..21: mol_type = other DNA; mol_type = other DNA
tacttcactggcaaaatagga

SEQ ID NO: 28504 - DNA, 21 bp, synthetic construct
  source 1..21: mol_type = other DNA; mol_type = other DNA
tggtattccggaatacgtgag

SEQ ID NO: 28505 - DNA, 21 bp, synthetic construct
  source 1..21: mol_type = other DNA; mol_type = other DNA
atgcatagacttactatggac

SEQ ID NO: 28506 - DNA, 21 bp, synthetic construct
  source 1..21: mol_type = other DNA; mol_type = other DNA
ttgtacgatggcgatggtccc

SEQ ID NO: 28507 - DNA, 21 bp, synthetic construct
  source 1..21: mol_type = other DNA; mol_type = other DNA
ctgctccaaagtacaacgtgg

SEQ ID NO: 28508 - DNA, 21 bp, synthetic construct
  source 1..21: mol_type = other DNA; mol_type = other DNA
tactgcaaggataataggccc

SEQ ID NO: 28509 - DNA, 21 bp, synthetic construct
  source 1..21: mol_type = other DNA; mol_type = other DNA
tattttactggcgtcaccggg

SEQ ID NO: 28510 - DNA, 21 bp, synthetic construct
  source 1..21: mol_type = other DNA; mol_type = other DNA
ggttcggatcacgttagatgg

SEQ ID NO: 28511 - DNA, 21 bp, synthetic construct
  source 1..21: mol_type = other DNA; mol_type = other DNA
tatgttaaaagccaaatgatc

SEQ ID NO: 28512 - DNA, 21 bp, synthetic construct
  source 1..21: mol_type = other DNA; mol_type = other DNA
gatttgagggccgctaattgg

SEQ ID NO: 28513 - DNA, 21 bp, synthetic construct
  source 1..21: mol_type = other DNA; mol_type = other DNA
tactccaagatgggtagcaac

SEQ ID NO: 28514 - DNA, 21 bp, synthetic construct
  source 1..21: mol_type = other DNA; mol_type = other DNA
ttgcaccggttacatacatcg

SEQ ID NO: 28515 - DNA, 21 bp, synthetic construct
  source 1..21: mol_type = other DNA; mol_type = other DNA
ttaaatgactatgtgacgtac

SEQ ID NO: 28516 - DNA, 21 bp, synthetic construct
  source 1..21: mol_type = other DNA; mol_type = other DNA
tatgcgcggaccggctgggat

SEQ ID NO: 28517 - DNA, 21 bp, synthetic construct
  source 1..21: mol_type = other DNA; mol_type = other DNA
tattcccgaattcaggtggat

SEQ ID NO: 28518 - DNA, 21 bp, synthetic construct
  source 1..21: mol_type = other DNA; mol_type = other DNA
tactatacgggaagggttgac

SEQ ID NO: 28519 - DNA, 21 bp, synthetic construct
  source 1..21: mol_type = other DNA; mol_type = other DNA
ctccatcggttaaacccctcc

SEQ ID NO: 28520 - DNA, 21 bp, synthetic construct
  source 1..21: mol_type = other DNA; mol_type = other DNA
caggatgagtacctctcgtgg

SEQ ID NO: 28521 - DNA, 21 bp, synthetic construct
  source 1..21: mol_type = other DNA; mol_type = other DNA
aggacattcgacgcatatcca

SEQ ID NO: 28522 - DNA, 21 bp, synthetic construct
  source 1..21: mol_type = other DNA; mol_type = other DNA
ttcgtaaagtcacagccaggc

SEQ ID NO: 28523 - DNA, 21 bp, synthetic construct
  source 1..21: mol_type = other DNA; mol_type = other DNA
tatttcactggtagggctgac

SEQ ID NO: 28524 - DNA, 21 bp, synthetic construct
  source 1..21: mol_type = other DNA; mol_type = other DNA
gatatgcgggatcgcatgtgg

SEQ ID NO: 28525 - DNA, 21 bp, synthetic construct
  source 1..21: mol_type = other DNA; mol_type = other DNA
ggctcaggcaccagtcactgg

SEQ ID NO: 28526 - DNA, 21 bp, synthetic construct
  source 1..21: mol_type = other DNA; mol_type = other DNA
ggcagcgggacttcgagctgg

SEQ ID NO: 28527 - DNA, 21 bp, synthetic construct
  source 1..21: mol_type = other DNA; mol_type = other DNA
tatattaagggggacttattc

SEQ ID NO: 28528 - DNA, 21 bp, synthetic construct
  source 1..21: mol_type = other DNA; mol_type = other DNA
tatttcactggtgtattaccc

SEQ ID NO: 28529 - DNA, 21 bp, synthetic construct
  source 1..21: mol_type = other DNA; mol_type = other DNA
tacttctcaggaagaatcgac

SEQ ID NO: 28530 - DNA, 21 bp, synthetic construct
  source 1..21: mol_type = other DNA; mol_type = other DNA
tactataccggcgtgaagaac

SEQ ID NO: 28531 - DNA, 21 bp, synthetic construct
  source 1..21: mol_type = other DNA; mol_type = other DNA
tacttcaccggcaaagtaggg

SEQ ID NO: 28532 - DNA, 21 bp, synthetic construct
  source 1..21: mol_type = other DNA; mol_type = other DNA
tacagtcgtctaaatataaac

SEQ ID NO: 28533 - DNA, 21 bp, synthetic construct
  source 1..21: mol_type = other DNA; mol_type = other DNA
atcatggagagtcaatcttgg

SEQ ID NO: 28534 - DNA, 21 bp, synthetic construct
  source 1..21: mol_type = other DNA; mol_type = other DNA
gggtcagagtacagtaagtgg

SEQ ID NO: 28535 - DNA, 21 bp, synthetic construct
  source 1..21: mol_type = other DNA; mol_type = other DNA
tacagccgcatcggcgggaat

SEQ ID NO: 28536 - DNA, 21 bp, synthetic construct
  source 1..21: mol_type = other DNA; mol_type = other DNA
tattgggcgggtaagatagaa

SEQ ID NO: 28537 - DNA, 21 bp, synthetic construct
  source 1..21: mol_type = other DNA; mol_type = other DNA
acgatatcgactaatggcatc

SEQ ID NO: 28538 - DNA, 21 bp, synthetic construct
  source 1..21: mol_type = other DNA; mol_type = other DNA
ttcgcgaagagcgggtataac

SEQ ID NO: 28539 - DNA, 21 bp, synthetic construct
  source 1..21: mol_type = other DNA; mol_type = other DNA
gggtgcataattccaggtgtt

SEQ ID NO: 28540 - DNA, 21 bp, synthetic construct
  source 1..21: mol_type = other DNA; mol_type = other DNA
cccatgggtcaggctacttgg

SEQ ID NO: 28541 - DNA, 21 bp, synthetic construct
  source 1..21: mol_type = other DNA; mol_type = other DNA
tattggagtggcacagttgac

SEQ ID NO: 28542 - DNA, 21 bp, synthetic construct
  source 1..21: mol_type = other DNA; mol_type = other DNA
ttcttttcaggaaaaattgac

SEQ ID NO: 28543 - DNA, 21 bp, synthetic construct
  source 1..21: mol_type = other DNA; mol_type = other DNA
tactggagtaagatagctgaa

SEQ ID NO: 28544 - DNA, 21 bp, synthetic construct
  source 1..21: mol_type = other DNA; mol_type = other DNA
cgcgacagcacgcatgggata

SEQ ID NO: 28545 - DNA, 21 bp, synthetic construct
  source 1..21: mol_type = other DNA; mol_type = other DNA
gctggcggaggcttgtatata

SEQ ID NO: 28546 - DNA, 21 bp, synthetic construct
  source 1..21: mol_type = other DNA; mol_type = other DNA
tactacacagggcaagtgtca

SEQ ID NO: 28547 - DNA, 21 bp, synthetic construct
  source 1..21: mol_type = other DNA; mol_type = other DNA
tttcaccgactgtccgacgat

SEQ ID NO: 28548 - DNA, 21 bp, synthetic construct
  source 1..21: mol_type = other DNA; mol_type = other DNA
tacagtagaacgaacataaac

SEQ ID NO: 28549 - DNA, 21 bp, synthetic construct
  source 1..21: mol_type = other DNA; mol_type = other DNA
tatatgaaggatgcgttcccg

SEQ ID NO: 28550 - DNA, 21 bp, synthetic construct
  source 1..21: mol_type = other DNA; mol_type = other DNA
aaagatgactggaactcatgg

SEQ ID NO: 28551 - DNA, 21 bp, synthetic construct
  source 1..21: mol_type = other DNA; mol_type = other DNA
tttagcaggctgggaaacaac

SEQ ID NO: 28552 - DNA, 21 bp, synthetic construct
  source 1..21: mol_type = other DNA; mol_type = other DNA
tggttcaccggaaaagtggac

SEQ ID NO: 28553 - DNA, 21 bp, synthetic construct
  source 1..21: mol_type = other DNA; mol_type = other DNA
ttgagtagaacgtcgatcgac

SEQ ID NO: 28554 - DNA, 21 bp, synthetic construct
  source 1..21: mol_type = other DNA; mol_type = other DNA
tatagtagaattggacctatg

SEQ ID NO: 28555 - DNA, 21 bp, synthetic construct
  source 1..21: mol_type = other DNA; mol_type = other DNA
tactcaaaagggaattacaac

SEQ ID NO: 28556 - DNA, 21 bp, synthetic construct
  source 1..21: mol_type = other DNA; mol_type = other DNA
taccataggttatctgaaatg

SEQ ID NO: 28557 - DNA, 21 bp, synthetic construct
  source 1..21: mol_type = other DNA; mol_type = other DNA
ttctttagtggcatcatggaa

SEQ ID NO: 28558 - DNA, 21 bp, synthetic construct
  source 1..21: mol_type = other DNA; mol_type = other DNA
ggggatgaatgggtcggctat

SEQ ID NO: 28559 - DNA, 21 bp, synthetic construct
  source 1..21: mol_type = other DNA; mol_type = other DNA
aggctcgagagccaggtatgg

SEQ ID NO: 28560 - DNA, 21 bp, synthetic construct
  source 1..21: mol_type = other DNA; mol_type = other DNA
tgcaagccgccaatggctcca

SEQ ID NO: 28561 - DNA, 21 bp, synthetic construct
  source 1..21: mol_type = other DNA; mol_type = other DNA
agggacgcagacgttttcccg

SEQ ID NO: 28562 - DNA, 21 bp, synthetic construct
  source 1..21: mol_type = other DNA; mol_type = other DNA
gtatccgattatgcgtcgtat

SEQ ID NO: 28563 - DNA, 21 bp, synthetic construct
  source 1..21: mol_type = other DNA; mol_type = other DNA
tgggttaaatcgcaacagcat

SEQ ID NO: 28564 - DNA, 21 bp, synthetic construct
  source 1..21: mol_type = other DNA; mol_type = other DNA
tacgcacggatcgggtataac

SEQ ID NO: 28565 - DNA, 21 bp, synthetic construct
  source 1..21: mol_type = other DNA; mol_type = other DNA
cgaacattcgacgcatatccg

SEQ ID NO: 28566 - DNA, 21 bp, synthetic construct
  source 1..21: mol_type = other DNA; mol_type = other DNA
tacttcacgggcaggacaagc

SEQ ID NO: 28567 - DNA, 21 bp, synthetic construct
  source 1..21: mol_type = other DNA; mol_type = other DNA
tactggacaggagtcggtgcg

SEQ ID NO: 28568 - DNA, 21 bp, synthetic construct
  source 1..21: mol_type = other DNA; mol_type = other DNA
agggatggcacatcgatctgg

SEQ ID NO: 28569 - DNA, 21 bp, synthetic construct
  source 1..21: mol_type = other DNA; mol_type = other DNA
tatcacgcaaggcaaattaat

SEQ ID NO: 28570 - DNA, 21 bp, synthetic construct
  source 1..21: mol_type = other DNA; mol_type = other DNA
cttagtcgtttggggcctatt

SEQ ID NO: 28571 - DNA, 21 bp, synthetic construct
  source 1..21: mol_type = other DNA; mol_type = other DNA
tattggtctgggaaagcagcg

SEQ ID NO: 28572 - DNA, 21 bp, synthetic construct
  source 1..21: mol_type = other DNA; mol_type = other DNA
tactcacgattaaatgagaat

SEQ ID NO: 28573 - DNA, 21 bp, synthetic construct
  source 1..21: mol_type = other DNA; mol_type = other DNA
cacagcaggctcaatgtctca

SEQ ID NO: 28574 - DNA, 21 bp, synthetic construct
  source 1..21: mol_type = other DNA; mol_type = other DNA
atgtgggatggtaccagcccc

SEQ ID NO: 28575 - DNA, 21 bp, synthetic construct
  source 1..21: mol_type = other DNA; mol_type = other DNA
cgtcagtcaaccaatggcgtc

SEQ ID NO: 28576 - DNA, 21 bp, synthetic construct
  source 1..21: mol_type = other DNA; mol_type = other DNA
tactggtctgctgtggttgcg

SEQ ID NO: 28577 - DNA, 21 bp, synthetic construct
  source 1..21: mol_type = other DNA; mol_type = other DNA
tattttagcggacagttggct

SEQ ID NO: 28578 - DNA, 21 bp, synthetic construct
  source 1..21: mol_type = other DNA; mol_type = other DNA
gctatgcaggaccgcagttgg

SEQ ID NO: 28579 - DNA, 21 bp, synthetic construct
  source 1..21: mol_type = other DNA; mol_type = other DNA
ttttcacgcctcggaaataat

SEQ ID NO: 28580 - DNA, 21 bp, synthetic construct
  source 1..21: mol_type = other DNA; mol_type = other DNA
tgtgctccatatttacgtgaa

SEQ ID NO: 28581 - DNA, 21 bp, synthetic construct
  source 1..21: mol_type = other DNA; mol_type = other DNA
aggtcagacttcacgagctat

SEQ ID NO: 28582 - DNA, 21 bp, synthetic construct
  source 1..21: mol_type = other DNA; mol_type = other DNA
tttttcaccggcattcaagct

SEQ ID NO: 28583 - DNA, 21 bp, synthetic construct
  source 1..21: mol_type = other DNA; mol_type = other DNA
agggacgattatgtgtattac

SEQ ID NO: 28584 - DNA, 21 bp, synthetic construct
  source 1..21: mol_type = other DNA; mol_type = other DNA
tgccataaaaaggaggaaggc

SEQ ID NO: 28585 - DNA, 21 bp, synthetic construct
  source 1..21: mol_type = other DNA; mol_type = other DNA
tcaatggcttcagttaagtgg

SEQ ID NO: 28586 - DNA, 21 bp, synthetic construct
  source 1..21: mol_type = other DNA; mol_type = other DNA
tatccgggtaaaacctgctcc

SEQ ID NO: 28587 - DNA, 21 bp, synthetic construct
  source 1..21: mol_type = other DNA; mol_type = other DNA
tattctagaatcggtgccaat

SEQ ID NO: 28588 - DNA, 21 bp, synthetic construct
  source 1..21: mol_type = other DNA; mol_type = other DNA
tactcaaaaaacggccttaac

SEQ ID NO: 28589 - DNA, 21 bp, synthetic construct
  source 1..21: mol_type = other DNA; mol_type = other DNA
tgtactcgagtggtcgtcgat

SEQ ID NO: 28590 - DNA, 21 bp, synthetic construct
  source 1..21: mol_type = other DNA; mol_type = other DNA
tactctaaagctggctacgac

SEQ ID NO: 28591 - DNA, 21 bp, synthetic construct
  source 1..21: mol_type = other DNA; mol_type = other DNA
agagatgaatacgttcattgg

SEQ ID NO: 28592 - DNA, 21 bp, synthetic construct
  source 1..21: mol_type = other DNA; mol_type = other DNA
ttttcctctacaaatggaatc

SEQ ID NO: 28593 - DNA, 21 bp, synthetic construct
  source 1..21: mol_type = other DNA; mol_type = other DNA
tattctaaggccaattgtaac

SEQ ID NO: 28594 - DNA, 21 bp, synthetic construct
  source 1..21: mol_type = other DNA; mol_type = other DNA
tacagcagagctggattcgac

SEQ ID NO: 28595 - DNA, 21 bp, synthetic construct
  source 1..21: mol_type = other DNA; mol_type = other DNA
tactacaccggtagaatggaa

SEQ ID NO: 28596 - DNA, 21 bp, synthetic construct
  source 1..21: mol_type = other DNA; mol_type = other DNA
agccttgagtcacgtgactgg

SEQ ID NO: 28597 - DNA, 21 bp, synthetic construct
  source 1..21: mol_type = other DNA; mol_type = other DNA
ctcttcgacgctacgccatcc

SEQ ID NO: 28598 - DNA, 21 bp, synthetic construct
  source 1..21: mol_type = other DNA; mol_type = other DNA
tattctagaataggtggaaac

SEQ ID NO: 28599 - DNA, 21 bp, synthetic construct
  source 1..21: mol_type = other DNA; mol_type = other DNA
ttctctaaaatagggtataat

SEQ ID NO: 28600 - DNA, 21 bp, synthetic construct
  source 1..21: mol_type = other DNA; mol_type = other DNA
attaaaagtacaaacggcata

SEQ ID NO: 28601 - DNA, 21 bp, synthetic construct
  source 1..21: mol_type = other DNA; mol_type = other DNA
gtcccgtcgagcgttaaatgg

SEQ ID NO: 28602 - DNA, 21 bp, synthetic construct
  source 1..21: mol_type = other DNA; mol_type = other DNA
tggcccaacggggtggcaggt

SEQ ID NO: 28603 - DNA, 21 bp, synthetic construct
  source 1..21: mol_type = other DNA; mol_type = other DNA
tatttttccggacaacacagt

SEQ ID NO: 28604 - DNA, 21 bp, synthetic construct
  source 1..21: mol_type = other DNA; mol_type = other DNA
tatgagagtacgaatggcatc

SEQ ID NO: 28605 - DNA, 21 bp, synthetic construct
  source 1..21: mol_type = other DNA; mol_type = other DNA
gtagccatgaagggtgctggc

SEQ ID NO: 28606 - DNA, 21 bp, synthetic construct
  source 1..21: mol_type = other DNA; mol_type = other DNA
tgttcagtagtgacaggcagc

SEQ ID NO: 28607 - DNA, 21 bp, synthetic construct
  source 1..21: mol_type = other DNA; mol_type = other DNA
tactttagcggtcaaattaaa

SEQ ID NO: 28608 - DNA, 21 bp, synthetic construct
  source 1..21: mol_type = other DNA; mol_type = other DNA
tattcaaggctgcatgctgta

SEQ ID NO: 28609 - DNA, 21 bp, synthetic construct
  source 1..21: mol_type = other DNA; mol_type = other DNA
tatgcccgcgtcggcaataac

SEQ ID NO: 28610 - DNA, 21 bp, synthetic construct
  source 1..21: mol_type = other DNA; mol_type = other DNA
tactacagtggcgtaaaatca

SEQ ID NO: 28611 - DNA, 21 bp, synthetic construct
  source 1..21: mol_type = other DNA; mol_type = other DNA
acctggatgggcgataacgcg

SEQ ID NO: 28612 - DNA, 21 bp, synthetic construct
  source 1..21: mol_type = other DNA; mol_type = other DNA
tactggcaaggtattgtagat

SEQ ID NO: 28613 - DNA, 21 bp, synthetic construct
  source 1..21: mol_type = other DNA; mol_type = other DNA
tatttcacagggaggccaatg

SEQ ID NO: 28614 - DNA, 21 bp, synthetic construct
  source 1..21: mol_type = other DNA; mol_type = other DNA
tattatactgggaagtgtgac

SEQ ID NO: 28615 - DNA, 21 bp, synthetic construct
  source 1..21: mol_type = other DNA; mol_type = other DNA
ttctggtcgggtattaaagaa

SEQ ID NO: 28616 - DNA, 21 bp, synthetic construct
  source 1..21: mol_type = other DNA; mol_type = other DNA
ttgtcgcgtcttagtcccgtc

SEQ ID NO: 28617 - DNA, 21 bp, synthetic construct
  source 1..21: mol_type = other DNA; mol_type = other DNA
cgggacggtacctcacagtgg

SEQ ID NO: 28618 - DNA, 21 bp, synthetic construct
  source 1..21: mol_type = other DNA; mol_type = other DNA
gtaggggaggcacgtagttgg

SEQ ID NO: 28619 - DNA, 21 bp, synthetic construct
  source 1..21: mol_type = other DNA; mol_type = other DNA
gcaatgcaagataggtcttgg

SEQ ID NO: 28620 - DNA, 21 bp, synthetic construct
  source 1..21: mol_type = other DNA; mol_type = other DNA
gagccggagtcacgcgcatgg

SEQ ID NO: 28621 - DNA, 21 bp, synthetic construct
  source 1..21: mol_type = other DNA; mol_type = other DNA
ttacacagattacacctagac

SEQ ID NO: 28622 - DNA, 21 bp, synthetic construct
  source 1..21: mol_type = other DNA; mol_type = other DNA
tactactcaggaagaattgaa

SEQ ID NO: 28623 - DNA, 21 bp, synthetic construct
  source 1..21: mol_type = other DNA; mol_type = other DNA
ctgacccgattggtgaataac

SEQ ID NO: 28624 - DNA, 21 bp, synthetic construct
  source 1..21: mol_type = other DNA; mol_type = other DNA
gggtcgggaaccagctcatgg

SEQ ID NO: 28625 - DNA, 21 bp, synthetic construct
  source 1..21: mol_type = other DNA; mol_type = other DNA
aaagacgattatacagttttt

SEQ ID NO: 28626 - DNA, 21 bp, synthetic construct
  source 1..21: mol_type = other DNA; mol_type = other DNA
tatagtcgtatacagcctatg

SEQ ID NO: 28627 - DNA, 21 bp, synthetic construct
  source 1..21: mol_type = other DNA; mol_type = other DNA
ggttgccgccatggacccata

SEQ ID NO: 28628 - DNA, 21 bp, synthetic construct
  source 1..21: mol_type = other DNA; mol_type = other DNA
tacgtgaaaagccagggaatg

SEQ ID NO: 28629 - DNA, 21 bp, synthetic construct
  source 1..21: mol_type = other DNA; mol_type = other DNA
tattttagtggaacgagggcg

SEQ ID NO: 28630 - DNA, 21 bp, synthetic construct
  source 1..21: mol_type = other DNA; mol_type = other DNA
tacttcagcggagtgccgagc

SEQ ID NO: 28631 - DNA, 21 bp, synthetic construct
  source 1..21: mol_type = other DNA; mol_type = other DNA
cctcatagtacgaatggagtc

SEQ ID NO: 28632 - DNA, 21 bp, synthetic construct
  source 1..21: mol_type = other DNA; mol_type = other DNA
atgtccaagttaaatgcgaat

SEQ ID NO: 28633 - DNA, 21 bp, synthetic construct
  source 1..21: mol_type = other DNA; mol_type = other DNA
tacgcaaaaatagggtacaat

SEQ ID NO: 28634 - DNA, 21 bp, synthetic construct
  source 1..21: mol_type = other DNA; mol_type = other DNA
ttcttcagtgggaagattgaa

SEQ ID NO: 28635 - DNA, 21 bp, synthetic construct
  source 1..21: mol_type = other DNA; mol_type = other DNA
aggagccccgacgtttacccc

SEQ ID NO: 28636 - DNA, 21 bp, synthetic construct
  source 1..21: mol_type = other DNA; mol_type = other DNA
tacagtagggctgggatggac

SEQ ID NO: 28637 - DNA, 21 bp, synthetic construct
  source 1..21: mol_type = other DNA; mol_type = other DNA
tatagtcgtcttaacgatgcg

SEQ ID NO: 28638 - DNA, 21 bp, synthetic construct
  source 1..21: mol_type = other DNA; mol_type = other DNA
gatcttagggccggcaattgg

SEQ ID NO: 28639 - DNA, 21 bp, synthetic construct
  source 1..21: mol_type = other DNA; mol_type = other DNA
ttttcgcgaatcggaatcaac

SEQ ID NO: 28640 - DNA, 21 bp, synthetic construct
  source 1..21: mol_type = other DNA; mol_type = other DNA
tacttcgctggaaagcaggac

SEQ ID NO: 28641 - DNA, 21 bp, synthetic construct
  source 1..21: mol_type = other DNA; mol_type = other DNA
tatttcgcgggtgttaaaggc

SEQ ID NO: 28642 - DNA, 21 bp, synthetic construct
  source 1..21: mol_type = other DNA; mol_type = other DNA
tatctaaagagccagagttgg

SEQ ID NO: 28643 - DNA, 21 bp, synthetic construct
  source 1..21: mol_type = other DNA; mol_type = other DNA
tactcaaagcagggaataaat

SEQ ID NO: 28644 - DNA, 21 bp, synthetic construct
  source 1..21: mol_type = other DNA; mol_type = other DNA
attgcggagcgtggatgcgcg

SEQ ID NO: 28645 - DNA, 21 bp, synthetic construct
  source 1..21: mol_type = other DNA; mol_type = other DNA
tacttctcggcgatcaaggag

SEQ ID NO: 28646 - DNA, 21 bp, synthetic construct
  source 1..21: mol_type = other DNA; mol_type = other DNA
tattcgaaaggcaatttgaac

SEQ ID NO: 28647 - DNA, 21 bp, synthetic construct
  source 1..21: mol_type = other DNA; mol_type = other DNA
gacggcgcaatataccttcgg

SEQ ID NO: 28648 - DNA, 21 bp, synthetic construct
  source 1..21: mol_type = other DNA; mol_type = other DNA
tttgcgcggatcggtcccaac

SEQ ID NO: 28649 - DNA, 21 bp, synthetic construct
  source 1..21: mol_type = other DNA; mol_type = other DNA
tacagtagacttaatggcaac

SEQ ID NO: 28650 - DNA, 21 bp, synthetic construct
  source 1..21: mol_type = other DNA; mol_type = other DNA
tgcaaaccaaaacaggtggat

SEQ ID NO: 28651 - DNA, 21 bp, synthetic construct
  source 1..21: mol_type = other DNA; mol_type = other DNA
tattttcagggtaggatagat

SEQ ID NO: 28652 - DNA, 21 bp, synthetic construct
  source 1..21: mol_type = other DNA; mol_type = other DNA
tacgcgaggagtggcactaac

SEQ ID NO: 28653 - DNA, 21 bp, synthetic construct
  source 1..21: mol_type = other DNA; mol_type = other DNA
tattcgagaatccaggcggat

SEQ ID NO: 28654 - DNA, 21 bp, synthetic construct
  source 1..21: mol_type = other DNA; mol_type = other DNA
tatttctcaggccaacttgca

SEQ ID NO: 28655 - DNA, 21 bp, synthetic construct
  source 1..21: mol_type = other DNA; mol_type = other DNA
ttgtctaaaatgaatgtaaat

SEQ ID NO: 28656 - DNA, 21 bp, synthetic construct
  source 1..21: mol_type = other DNA; mol_type = other DNA
atgggagggacttcctgtctc

SEQ ID NO: 28657 - DNA, 21 bp, synthetic construct
  source 1..21: mol_type = other DNA; mol_type = other DNA
tatcaccgcttgggtcaaaat

SEQ ID NO: 28658 - DNA, 21 bp, synthetic construct
  source 1..21: mol_type = other DNA; mol_type = other DNA
gtcagtgactacgccagttac

SEQ ID NO: 28659 - DNA, 21 bp, synthetic construct
  source 1..21: mol_type = other DNA; mol_type = other DNA
tattggtcaggtcttcacgcc

SEQ ID NO: 28660 - DNA, 21 bp, synthetic construct
  source 1..21: mol_type = other DNA; mol_type = other DNA
aagtgtgacataaagccggca

SEQ ID NO: 28661 - DNA, 21 bp, synthetic construct
  source 1..21: mol_type = other DNA; mol_type = other DNA
gtcatggatggtttgcgttgg

SEQ ID NO: 28662 - DNA, 21 bp, synthetic construct
  source 1..21: mol_type = other DNA; mol_type = other DNA
ggatcggaatttcttgggtgg

SEQ ID NO: 28663 - DNA, 21 bp, synthetic construct
  source 1..21: mol_type = other DNA; mol_type = other DNA
tacttcaccaagcaagtagat

SEQ ID NO: 28664 - DNA, 21 bp, synthetic construct
  source 1..21: mol_type = other DNA; mol_type = other DNA
tatgcacgaaatggattaaat

SEQ ID NO: 28665 - DNA, 21 bp, synthetic construct
  source 1..21: mol_type = other DNA; mol_type = other DNA
tacttcgcaggaagaatagat

SEQ ID NO: 28666 - DNA, 21 bp, synthetic construct
  source 1..21: mol_type = other DNA; mol_type = other DNA
tacagccgtattggcattaac

SEQ ID NO: 28667 - DNA, 21 bp, synthetic construct
  source 1..21: mol_type = other DNA; mol_type = other DNA
caaggggaagctaggtcgtgg

SEQ ID NO: 28668 - DNA, 21 bp, synthetic construct
  source 1..21: mol_type = other DNA; mol_type = other DNA
tattttagtggggtaacaggc

SEQ ID NO: 28669 - DNA, 21 bp, synthetic construct
  source 1..21: mol_type = other DNA; mol_type = other DNA
tcatcgggtacatcgcgatgg

SEQ ID NO: 28670 - DNA, 21 bp, synthetic construct
  source 1..21: mol_type = other DNA; mol_type = other DNA
tgtaaatcacagagtagccaa

SEQ ID NO: 28671 - DNA, 21 bp, synthetic construct
  source 1..21: mol_type = other DNA; mol_type = other DNA
tacgagagcactaacggaagg

SEQ ID NO: 28672 - DNA, 21 bp, synthetic construct
  source 1..21: mol_type = other DNA; mol_type = other DNA
ttctcgcgcgcaggttacaac

SEQ ID NO: 28673 - DNA, 21 bp, synthetic construct
  source 1..21: mol_type = other DNA; mol_type = other DNA
aggtctgaatttacctcgtat

SEQ ID NO: 28674 - DNA, 21 bp, synthetic construct
  source 1..21: mol_type = other DNA; mol_type = other DNA
tactactccggaagggtagaa

SEQ ID NO: 28675 - DNA, 21 bp, synthetic construct
  source 1..21: mol_type = other DNA; mol_type = other DNA
ggatcgggcacgagccattgg

SEQ ID NO: 28676 - DNA, 21 bp, synthetic construct
  source 1..21: mol_type = other DNA; mol_type = other DNA
tgcaagccaatatgttgtgag

SEQ ID NO: 28677 - DNA, 21 bp, synthetic construct
  source 1..21: mol_type = other DNA; mol_type = other DNA
gacatgagagacagaatgtgg

SEQ ID NO: 28678 - DNA, 21 bp, synthetic construct
  source 1..21: mol_type = other DNA; mol_type = other DNA
gttctgagctcaaaaacttgg

SEQ ID NO: 28679 - DNA, 21 bp, synthetic construct
  source 1..21: mol_type = other DNA; mol_type = other DNA
cgcctttacgacgcgtatgaa

SEQ ID NO: 28680 - DNA, 21 bp, synthetic construct
  source 1..21: mol_type = other DNA; mol_type = other DNA
tgcagggacgacaagaggtgg

SEQ ID NO: 28681 - DNA, 21 bp, synthetic construct
  source 1..21: mol_type = other DNA; mol_type = other DNA
tatgccaaagctaactataac

SEQ ID NO: 28682 - DNA, 21 bp, synthetic construct
  source 1..21: mol_type = other DNA; mol_type = other DNA
tatagtaggttaggtcagaat

SEQ ID NO: 28683 - DNA, 21 bp, synthetic construct
  source 1..21: mol_type = other DNA; mol_type = other DNA
ttatgtaagccttgttcggaa

SEQ ID NO: 28684 - DNA, 21 bp, synthetic construct
  source 1..21: mol_type = other DNA; mol_type = other DNA
ctatcgaggatgaatttcaac

SEQ ID NO: 28685 - DNA, 21 bp, synthetic construct
  source 1..21: mol_type = other DNA; mol_type = other DNA
tgtaaagggcaaggtccaagc

SEQ ID NO: 28686 - DNA, 21 bp, synthetic construct
  source 1..21: mol_type = other DNA; mol_type = other DNA
ataatgagtgacagggaatgg

SEQ ID NO: 28687 - DNA, 21 bp, synthetic construct
  source 1..21: mol_type = other DNA; mol_type = other DNA
tactccaaacagaacgaaaac

SEQ ID NO: 28688 - DNA, 21 bp, synthetic construct
  source 1..21: mol_type = other DNA; mol_type = other DNA
tattttagtggaacccactcc

SEQ ID NO: 28689 - DNA, 21 bp, synthetic construct
  source 1..21: mol_type = other DNA; mol_type = other DNA
tattttacagggttccgcgaa

SEQ ID NO: 28690 - DNA, 21 bp, synthetic construct
  source 1..21: mol_type = other DNA; mol_type = other DNA
tatgtacgtagcgatactact

SEQ ID NO: 28691 - DNA, 21 bp, synthetic construct
  source 1..21: mol_type = other DNA; mol_type = other DNA
tacttcacaggggtagcggtc

SEQ ID NO: 28692 - DNA, 21 bp, synthetic construct
  source 1..21: mol_type = other DNA; mol_type = other DNA
tgcaggatggatagtgtacct

SEQ ID NO: 28693 - DNA, 21 bp, synthetic construct
  source 1..21: mol_type = other DNA; mol_type = other DNA
tatgttcgcagtgacactttc

SEQ ID NO: 28694 - DNA, 21 bp, synthetic construct
  source 1..21: mol_type = other DNA; mol_type = other DNA
taccaccgcctaggagattcg

SEQ ID NO: 28695 - DNA, 21 bp, synthetic construct
  source 1..21: mol_type = other DNA; mol_type = other DNA
tgcaagccgagcccgggtatg

SEQ ID NO: 28696 - DNA, 21 bp, synthetic construct
  source 1..21: mol_type = other DNA; mol_type = other DNA
tattctaagatgggcgtgaat

SEQ ID NO: 28697 - DNA, 21 bp, synthetic construct
  source 1..21: mol_type = other DNA; mol_type = other DNA
tatttcagcggtcagcaggac

SEQ ID NO: 28698 - DNA, 21 bp, synthetic construct
  source 1..21: mol_type = other DNA; mol_type = other DNA
aacgaagattgggtcaagtgg

SEQ ID NO: 28699 - DNA, 21 bp, synthetic construct
  source 1..21: mol_type = other DNA; mol_type = other DNA
tacgtcaagggagacacgcgt

SEQ ID NO: 28700 - DNA, 21 bp, synthetic construct
  source 1..21: mol_type = other DNA; mol_type = other DNA
tactcgcgcgcgaacgacaat

SEQ ID NO: 28701 - DNA, 21 bp, synthetic construct
  source 1..21: mol_type = other DNA; mol_type = other DNA
tatagcagaataggggaggga

SEQ ID NO: 28702 - DNA, 21 bp, synthetic construct
  source 1..21: mol_type = other DNA; mol_type = other DNA
tactatagcggaatcgttgcg

SEQ ID NO: 28703 - DNA, 21 bp, synthetic construct
  source 1..21: mol_type = other DNA; mol_type = other DNA
agtatggcggatcgttcgtgg

SEQ ID NO: 28704 - DNA, 21 bp, synthetic construct
  source 1..21: mol_type = other DNA; mol_type = other DNA
tatttccatggacagattgac

SEQ ID NO: 28705 - DNA, 21 bp, synthetic construct
  source 1..21: mol_type = other DNA; mol_type = other DNA
tgtaagccccagacaatcggg

SEQ ID NO: 28706 - DNA, 21 bp, synthetic construct
  source 1..21: mol_type = other DNA; mol_type = other DNA
tatttctctgggaccaacgcg

SEQ ID NO: 28707 - DNA, 21 bp, synthetic construct
  source 1..21: mol_type = other DNA; mol_type = other DNA
tgctgtaaagacgagtgcccc

SEQ ID NO: 28708 - DNA, 21 bp, synthetic construct
  source 1..21: mol_type = other DNA; mol_type = other DNA
gagctcgattctcgagattgg

SEQ ID NO: 28709 - DNA, 21 bp, synthetic construct
  source 1..21: mol_type = other DNA; mol_type = other DNA
tattctagaatgggacccaat

SEQ ID NO: 28710 - DNA, 21 bp, synthetic construct
  source 1..21: mol_type = other DNA; mol_type = other DNA
ctctgcaggccgtgtagcgcg

SEQ ID NO: 28711 - DNA, 21 bp, synthetic construct
  source 1..21: mol_type = other DNA; mol_type = other DNA
tacagtagacttcaaccggtt

SEQ ID NO: 28712 - DNA, 21 bp, synthetic construct
  source 1..21: mol_type = other DNA; mol_type = other DNA
gtgatcagttcgaatggcgtc

SEQ ID NO: 28713 - DNA, 21 bp, synthetic construct
  source 1..21: mol_type = other DNA; mol_type = other DNA
cgtgacggcgagtcgtactgg

SEQ ID NO: 28714 - DNA, 21 bp, synthetic construct
  source 1..21: mol_type = other DNA; mol_type = other DNA
tatagcagagctggcgatgga

SEQ ID NO: 28715 - DNA, 21 bp, synthetic construct
  source 1..21: mol_type = other DNA; mol_type = other DNA
tactcaaggatatcggataac

SEQ ID NO: 28716 - DNA, 21 bp, synthetic construct
  source 1..21: mol_type = other DNA; mol_type = other DNA
acctggtcgacaaatggtatc

SEQ ID NO: 28717 - DNA, 21 bp, synthetic construct
  source 1..21: mol_type = other DNA; mol_type = other DNA
tacttttcgggtgtcaaaata

SEQ ID NO: 28718 - DNA, 21 bp, synthetic construct
  source 1..21: mol_type = other DNA; mol_type = other DNA
tttagccggattggccacaac

SEQ ID NO: 28719 - DNA, 21 bp, synthetic construct
  source 1..21: mol_type = other DNA; mol_type = other DNA
aggcccgagtgcgtcaccggg

SEQ ID NO: 28720 - DNA, 21 bp, synthetic construct
  source 1..21: mol_type = other DNA; mol_type = other DNA
tactttagcggtaaatcgtcg

SEQ ID NO: 28721 - DNA, 21 bp, synthetic construct
  source 1..21: mol_type = other DNA; mol_type = other DNA
tattacagtgggatcgtaaag

SEQ ID NO: 28722 - DNA, 21 bp, synthetic construct
  source 1..21: mol_type = other DNA; mol_type = other DNA
cgtgacgaatttacgtcatgg

SEQ ID NO: 28723 - DNA, 21 bp, synthetic construct
  source 1..21: mol_type = other DNA; mol_type = other DNA
ataaggtcgacgaacggagtt

SEQ ID NO: 28724 - DNA, 21 bp, synthetic construct
  source 1..21: mol_type = other DNA; mol_type = other DNA
aacgacggcagatcgttgtgg

SEQ ID NO: 28725 - DNA, 21 bp, synthetic construct
  source 1..21: mol_type = other DNA; mol_type = other DNA
caggagtccacgaatgggcgc

SEQ ID NO: 28726 - DNA, 21 bp, synthetic construct
  source 1..21: mol_type = other DNA; mol_type = other DNA
agccatagtaccaacggtatc

SEQ ID NO: 28727 - DNA, 21 bp, synthetic construct
  source 1..21: mol_type = other DNA; mol_type = other DNA
tacagcaaaagtggggacaat

SEQ ID NO: 28728 - DNA, 21 bp, synthetic construct
  source 1..21: mol_type = other DNA; mol_type = other DNA
tactttacaggtgcgtgggac

SEQ ID NO: 28729 - DNA, 21 bp, synthetic construct
  source 1..21: mol_type = other DNA; mol_type = other DNA
tacacgaaaagcgggccatca

SEQ ID NO: 28730 - DNA, 21 bp, synthetic construct
  source 1..21: mol_type = other DNA; mol_type = other DNA
tgtaagaaagcttgcggtgct

SEQ ID NO: 28731 - DNA, 21 bp, synthetic construct
  source 1..21: mol_type = other DNA; mol_type = other DNA
tacgcgcggcagggtccaaat

SEQ ID NO: 28732 - DNA, 21 bp, synthetic construct
  source 1..21: mol_type = other DNA; mol_type = other DNA
tgcaagccatacctccatgaa

SEQ ID NO: 28733 - DNA, 21 bp, synthetic construct
  source 1..21: mol_type = other DNA; mol_type = other DNA
tacttcaccggagtgacgcac

SEQ ID NO: 28734 - DNA, 21 bp, synthetic construct
  source 1..21: mol_type = other DNA; mol_type = other DNA
tactcaaagatgggtcagaat

SEQ ID NO: 28735 - DNA, 21 bp, synthetic construct
  source 1..21: mol_type = other DNA; mol_type = other DNA
gttgccggggccggctgtgga

SEQ ID NO: 28736 - DNA, 21 bp, synthetic construct
  source 1..21: mol_type = other DNA; mol_type = other DNA
ttctttactgggcagcgagat

SEQ ID NO: 28737 - DNA, 21 bp, synthetic construct
  source 1..21: mol_type = other DNA; mol_type = other DNA
gtaccggaaagatgcccgaag

SEQ ID NO: 28738 - DNA, 21 bp, synthetic construct
  source 1..21: mol_type = other DNA; mol_type = other DNA
ttgtcaaaagcaaactttaac

SEQ ID NO: 28739 - DNA, 21 bp, synthetic construct
  source 1..21: mol_type = other DNA; mol_type = other DNA
tcgggggctacttcaaattgg

SEQ ID NO: 28740 - DNA, 21 bp, synthetic construct
  source 1..21: mol_type = other DNA; mol_type = other DNA
tattggtccggattgaaggac

SEQ ID NO: 28741 - DNA, 21 bp, synthetic construct
  source 1..21: mol_type = other DNA; mol_type = other DNA
tactctcgactgggagcaaat

SEQ ID NO: 28742 - DNA, 21 bp, synthetic construct
  source 1..21: mol_type = other DNA; mol_type = other DNA
ttggaagatcatctgagatgg

SEQ ID NO: 28743 - DNA, 21 bp, synthetic construct
  source 1..21: mol_type = other DNA; mol_type = other DNA
ccatatgccaagagcgagctc

SEQ ID NO: 28744 - DNA, 21 bp, synthetic construct
  source 1..21: mol_type = other DNA; mol_type = other DNA
gacatgcgagacagaatttgg

SEQ ID NO: 28745 - DNA, 21 bp, synthetic construct
  source 1..21: mol_type = other DNA; mol_type = other DNA
tacttctcgggaaaaaatgac

SEQ ID NO: 28746 - DNA, 21 bp, synthetic construct
  source 1..21: mol_type = other DNA; mol_type = other DNA
agagacatcactgtttttcct

SEQ ID NO: 28747 - DNA, 21 bp, synthetic construct
  source 1..21: mol_type = other DNA; mol_type = other DNA
tatttcagcggtcaaatagtg

SEQ ID NO: 28748 - DNA, 21 bp, synthetic construct
  source 1..21: mol_type = other DNA; mol_type = other DNA
tacttcagcggcgtagtgcga

SEQ ID NO: 28749 - DNA, 21 bp, synthetic construct
  source 1..21: mol_type = other DNA; mol_type = other DNA
ggcgtgaatggctgtaaacct

SEQ ID NO: 28750 - DNA, 21 bp, synthetic construct
  source 1..21: mol_type = other DNA; mol_type = other DNA
gtttctgagtttcgcacttat

SEQ ID NO: 28751 - DNA, 21 bp, synthetic construct
  source 1..21: mol_type = other DNA; mol_type = other DNA
gcaggagcggatcgtgggtgg

SEQ ID NO: 28752 - DNA, 21 bp, synthetic construct
  source 1..21: mol_type = other DNA; mol_type = other DNA
ggaggcatcggttcagcatgg

SEQ ID NO: 28753 - DNA, 21 bp, synthetic construct
  source 1..21: mol_type = other DNA; mol_type = other DNA
tactcacggctaaacatgaac

SEQ ID NO: 28754 - DNA, 21 bp, synthetic construct
  source 1..21: mol_type = other DNA; mol_type = other DNA
gttgattcgtcaaatggtgtt

SEQ ID NO: 28755 - DNA, 21 bp, synthetic construct
  source 1..21: mol_type = other DNA; mol_type = other DNA
tactggacaggcatgccagat

SEQ ID NO: 28756 - DNA, 21 bp, synthetic construct
  source 1..21: mol_type = other DNA; mol_type = other DNA
cgcgcctacgacgcttttccc

SEQ ID NO: 28757 - DNA, 21 bp, synthetic construct
  source 1..21: mol_type = other DNA; mol_type = other DNA
tacgcgaggattgggtttaac

SEQ ID NO: 28758 - DNA, 21 bp, synthetic construct
  source 1..21: mol_type = other DNA; mol_type = other DNA
tgcaagtctaacacttacgat

SEQ ID NO: 28759 - DNA, 21 bp, synthetic construct
  source 1..21: mol_type = other DNA; mol_type = other DNA
tattcgcgggcgggggttaat

SEQ ID NO: 28760 - DNA, 21 bp, synthetic construct
  source 1..21: mol_type = other DNA; mol_type = other DNA
tattggaccggaaaggtagaa

SEQ ID NO: 28761 - DNA, 21 bp, synthetic construct
  source 1..21: mol_type = other DNA; mol_type = other DNA
tatttctcaggcattcagggg

SEQ ID NO: 28762 - DNA, 21 bp, synthetic construct
  source 1..21: mol_type = other DNA; mol_type = other DNA
tactacacaggcatccgtgat

SEQ ID NO: 28763 - DNA, 21 bp, synthetic construct
  source 1..21: mol_type = other DNA; mol_type = other DNA
tatttcagtgggattcttcca

SEQ ID NO: 28764 - DNA, 21 bp, synthetic construct
  source 1..21: mol_type = other DNA; mol_type = other DNA
ttccatcgcctcttgttggat

SEQ ID NO: 28765 - DNA, 21 bp, synthetic construct
  source 1..21: mol_type = other DNA; mol_type = other DNA
tattggacaggaaagcatgag

SEQ ID NO: 28766 - DNA, 21 bp, synthetic construct
  source 1..21: mol_type = other DNA; mol_type = other DNA
tgtaaaccaatttgttgcgaa

SEQ ID NO: 28767 - DNA, 21 bp, synthetic construct
  source 1..21: mol_type = other DNA; mol_type = other DNA
ttgccaggggtgaaatgtccc

SEQ ID NO: 28768 - DNA, 21 bp, synthetic construct
  source 1..21: mol_type = other DNA; mol_type = other DNA
tattttacaggagcgtatgac

SEQ ID NO: 28769 - DNA, 21 bp, synthetic construct
  source 1..21: mol_type = other DNA; mol_type = other DNA
tatagtaaatgcaatgtgaat

SEQ ID NO: 28770 - DNA, 21 bp, synthetic construct
  source 1..21: mol_type = other DNA; mol_type = other DNA
gcaatgcctgatcggggctgg

SEQ ID NO: 28771 - DNA, 21 bp, synthetic construct
  source 1..21: mol_type = other DNA; mol_type = other DNA
ttcgtcaggtccgacataaag

SEQ ID NO: 28772 - DNA, 21 bp, synthetic construct
  source 1..21: mol_type = other DNA; mol_type = other DNA
gcctggtcgaccaacggcgtt

SEQ ID NO: 28773 - DNA, 21 bp, synthetic construct
  source 1..21: mol_type = other DNA; mol_type = other DNA
tattccgccctacagcgcaat

SEQ ID NO: 28774 - DNA, 21 bp, synthetic construct
  source 1..21: mol_type = other DNA; mol_type = other DNA
cacttcagtacaaatggtgtg

SEQ ID NO: 28775 - DNA, 21 bp, synthetic construct
  source 1..21: mol_type = other DNA; mol_type = other DNA
ttttctagggcaggtatgaat

SEQ ID NO: 28776 - DNA, 21 bp, synthetic construct
  source 1..21: mol_type = other DNA; mol_type = other DNA
tttgcgcgacagggaccaaat

SEQ ID NO: 28777 - DNA, 21 bp, synthetic construct
  source 1..21: mol_type = other DNA; mol_type = other DNA
gccatggttgccagggactgg

SEQ ID NO: 28778 - DNA, 21 bp, synthetic construct
  source 1..21: mol_type = other DNA; mol_type = other DNA
cgcgacgaatttactcattat

SEQ ID NO: 28779 - DNA, 21 bp, synthetic construct
  source 1..21: mol_type = other DNA; mol_type = other DNA
ttcagcagagtgggattaaac

SEQ ID NO: 28780 - DNA, 21 bp, synthetic construct
  source 1..21: mol_type = other DNA; mol_type = other DNA
tattttagcggggtgcggtca

SEQ ID NO: 28781 - DNA, 21 bp, synthetic construct
  source 1..21: mol_type = other DNA; mol_type = other DNA
tatgcaaaaaccagccttaat

SEQ ID NO: 28782 - DNA, 21 bp, synthetic construct
  source 1..21: mol_type = other DNA; mol_type = other DNA
tattcgaagctggacaccaac

SEQ ID NO: 28783 - DNA, 21 bp, synthetic construct
  source 1..21: mol_type = other DNA; mol_type = other DNA
tactcacggacgggtaacaac

SEQ ID NO: 28784 - DNA, 21 bp, synthetic construct
  source 1..21: mol_type = other DNA; mol_type = other DNA
tattcgaaacaggggactaac

SEQ ID NO: 28785 - DNA, 21 bp, synthetic construct
  source 1..21: mol_type = other DNA; mol_type = other DNA
aaggacggcgtatcgaaatgg

SEQ ID NO: 28786 - DNA, 21 bp, synthetic construct
  source 1..21: mol_type = other DNA; mol_type = other DNA
ctgcacaagaccactcacaac

SEQ ID NO: 28787 - DNA, 21 bp, synthetic construct
  source 1..21: mol_type = other DNA; mol_type = other DNA
tatgcaaaaggtaattggaat

SEQ ID NO: 28788 - DNA, 21 bp, synthetic construct
  source 1..21: mol_type = other DNA; mol_type = other DNA
aaggatgatttcacgagatat

SEQ ID NO: 28789 - DNA, 21 bp, synthetic construct
  source 1..21: mol_type = other DNA; mol_type = other DNA
agaacctacgacacttttccg

SEQ ID NO: 28790 - DNA, 21 bp, synthetic construct
  source 1..21: mol_type = other DNA; mol_type = other DNA
aaggatggtcatagtttgtgg

SEQ ID NO: 28791 - DNA, 21 bp, synthetic construct
  source 1..21: mol_type = other DNA; mol_type = other DNA
tacgtcagaagcgacccgcgc

SEQ ID NO: 28792 - DNA, 21 bp, synthetic construct
  source 1..21: mol_type = other DNA; mol_type = other DNA
tattttagcaaagttcaagcg

SEQ ID NO: 28793 - DNA, 21 bp, synthetic construct
  source 1..21: mol_type = other DNA; mol_type = other DNA
tacagtcgactctcggataat

SEQ ID NO: 28794 - DNA, 21 bp, synthetic construct
  source 1..21: mol_type = other DNA; mol_type = other DNA
tatagcagagtaggtctaaac

SEQ ID NO: 28795 - DNA, 21 bp, synthetic construct
  source 1..21: mol_type = other DNA; mol_type = other DNA
ttacactctacaaatggggtt

SEQ ID NO: 28796 - DNA, 21 bp, synthetic construct
  source 1..21: mol_type = other DNA; mol_type = other DNA
gtgatgtcgtctaacggtgta

SEQ ID NO: 28797 - DNA, 21 bp, synthetic construct
  source 1..21: mol_type = other DNA; mol_type = other DNA
tacttctcaggggtcacccgc

SEQ ID NO: 28798 - DNA, 21 bp, synthetic construct
  source 1..21: mol_type = other DNA; mol_type = other DNA
agagaggaaggcgtcggttgg

SEQ ID NO: 28799 - DNA, 21 bp, synthetic construct
  source 1..21: mol_type = other DNA; mol_type = other DNA
cgcgatgactattcttcatat

SEQ ID NO: 28800 - DNA, 21 bp, synthetic construct
  source 1..21: mol_type = other DNA; mol_type = other DNA
tacgtgtcaacaaacggggtg

SEQ ID NO: 28801 - DNA, 21 bp, synthetic construct
  source 1..21: mol_type = other DNA; mol_type = other DNA
tattttaccggaatgcaagac

SEQ ID NO: 28802 - DNA, 21 bp, synthetic construct
  source 1..21: mol_type = other DNA; mol_type = other DNA
gcttgcaaaccgcagatgggt

SEQ ID NO: 28803 - DNA, 21 bp, synthetic construct
  source 1..21: mol_type = other DNA; mol_type = other DNA
tgtaggccacgtacaattgag

SEQ ID NO: 28804 - DNA, 21 bp, synthetic construct
  source 1..21: mol_type = other DNA; mol_type = other DNA
ataccccataaaggcatcgga

SEQ ID NO: 28805 - DNA, 21 bp, synthetic construct
  source 1..21: mol_type = other DNA; mol_type = other DNA
aaggatgactggacgacttat

SEQ ID NO: 28806 - DNA, 21 bp, synthetic construct
  source 1..21: mol_type = other DNA; mol_type = other DNA
tattggcaaggggttaaggaa

SEQ ID NO: 28807 - DNA, 21 bp, synthetic construct
  source 1..21: mol_type = other DNA; mol_type = other DNA
cactggagtaccaacggtgta

SEQ ID NO: 28808 - DNA, 21 bp, synthetic construct
  source 1..21: mol_type = other DNA; mol_type = other DNA
gacccatcttctagagcctgg

SEQ ID NO: 28809 - DNA, 21 bp, synthetic construct
  source 1..21: mol_type = other DNA; mol_type = other DNA
gacctacagagttctgtttgg

SEQ ID NO: 28810 - DNA, 21 bp, synthetic construct
  source 1..21: mol_type = other DNA; mol_type = other DNA
taccatgccgcaggtcctgac

SEQ ID NO: 28811 - DNA, 21 bp, synthetic construct
  source 1..21: mol_type = other DNA; mol_type = other DNA
tacgtgaggcacgaccctatg

SEQ ID NO: 28812 - DNA, 21 bp, synthetic construct
  source 1..21: mol_type = other DNA; mol_type = other DNA
ttcagctcaacaaatggggtc

SEQ ID NO: 28813 - DNA, 21 bp, synthetic construct
  source 1..21: mol_type = other DNA; mol_type = other DNA
tatttccaaggcgttaaaagt

SEQ ID NO: 28814 - DNA, 21 bp, synthetic construct
  source 1..21: mol_type = other DNA; mol_type = other DNA
gtaatggaagacaggaactgg

SEQ ID NO: 28815 - DNA, 21 bp, synthetic construct
  source 1..21: mol_type = other DNA; mol_type = other DNA
tgggtgcggagcgatattaag

SEQ ID NO: 28816 - DNA, 21 bp, synthetic construct
  source 1..21: mol_type = other DNA; mol_type = other DNA
ctttgggacgggacaggggct

SEQ ID NO: 28817 - DNA, 21 bp, synthetic construct
  source 1..21: mol_type = other DNA; mol_type = other DNA
tatttctcgggggtgtcgcac

SEQ ID NO: 28818 - DNA, 21 bp, synthetic construct
  source 1..21: mol_type = other DNA; mol_type = other DNA
ttttggagtggcgtaaaggaa

SEQ ID NO: 28819 - DNA, 21 bp, synthetic construct
  source 1..21: mol_type = other DNA; mol_type = other DNA
tgtcggattgaatcgcgcgcg

SEQ ID NO: 28820 - DNA, 21 bp, synthetic construct
  source 1..21: mol_type = other DNA; mol_type = other DNA
tacagtcggttgggagataac

SEQ ID NO: 28821 - DNA, 21 bp, synthetic construct
  source 1..21: mol_type = other DNA; mol_type = other DNA
tacagtcgggtaggacaaaac

SEQ ID NO: 28822 - DNA, 21 bp, synthetic construct
  source 1..21: mol_type = other DNA; mol_type = other DNA
tattggacaggaactcacgag

SEQ ID NO: 28823 - DNA, 21 bp, synthetic construct
  source 1..21: mol_type = other DNA; mol_type = other DNA
tattatacgggccgtgtttcg

SEQ ID NO: 28824 - DNA, 21 bp, synthetic construct
  source 1..21: mol_type = other DNA; mol_type = other DNA
tactacagcggcatccacgca

SEQ ID NO: 28825 - DNA, 21 bp, synthetic construct
  source 1..21: mol_type = other DNA; mol_type = other DNA
tacgcacgagtcggtctcaac

SEQ ID NO: 28826 - DNA, 21 bp, synthetic construct
  source 1..21: mol_type = other DNA; mol_type = other DNA
gaagggcctagcagaggttgg

SEQ ID NO: 28827 - DNA, 21 bp, synthetic construct
  source 1..21: mol_type = other DNA; mol_type = other DNA
gttctcgcttcggttagctgg

SEQ ID NO: 28828 - DNA, 21 bp, synthetic construct
  source 1..21: mol_type = other DNA; mol_type = other DNA
tgtcaggctaagcttgaggta

SEQ ID NO: 28829 - DNA, 21 bp, synthetic construct
  source 1..21: mol_type = other DNA; mol_type = other DNA
cgggaagactttacgatgtgg

SEQ ID NO: 28830 - DNA, 21 bp, synthetic construct
  source 1..21: mol_type = other DNA; mol_type = other DNA
tattcaaagcacggctataac

SEQ ID NO: 28831 - DNA, 21 bp, synthetic construct
  source 1..21: mol_type = other DNA; mol_type = other DNA
ctacatcgaagtgggatagac

SEQ ID NO: 28832 - DNA, 21 bp, synthetic construct
  source 1..21: mol_type = other DNA; mol_type = other DNA
tatttctcgggccggctcgac

SEQ ID NO: 28833 - DNA, 21 bp, synthetic construct
  source 1..21: mol_type = other DNA; mol_type = other DNA
tacagcagagtaggtgtaaat

SEQ ID NO: 28834 - DNA, 21 bp, synthetic construct
  source 1..21: mol_type = other DNA; mol_type = other DNA
tacagcaggctacacgtggac

SEQ ID NO: 28835 - DNA, 21 bp, synthetic construct
  source 1..21: mol_type = other DNA; mol_type = other DNA
tttagcagggcggggttcaac

SEQ ID NO: 28836 - DNA, 21 bp, synthetic construct
  source 1..21: mol_type = other DNA; mol_type = other DNA
tgcatgaagcgccctgaagtc

SEQ ID NO: 28837 - DNA, 21 bp, synthetic construct
  source 1..21: mol_type = other DNA; mol_type = other DNA
tactttacgggtatgactgat

SEQ ID NO: 28838 - DNA, 21 bp, synthetic construct
  source 1..21: mol_type = other DNA; mol_type = other DNA
tactcgagagttaacgagaat

SEQ ID NO: 28839 - DNA, 21 bp, synthetic construct
  source 1..21: mol_type = other DNA; mol_type = other DNA
tacgcccgcacgggtgcgaac

SEQ ID NO: 28840 - DNA, 21 bp, synthetic construct
  source 1..21: mol_type = other DNA; mol_type = other DNA
tattggcagggcatcgtcgac

SEQ ID NO: 28841 - DNA, 21 bp, synthetic construct
  source 1..21: mol_type = other DNA; mol_type = other DNA
caaatgaaggataggacctgg

SEQ ID NO: 28842 - DNA, 21 bp, synthetic construct
  source 1..21: mol_type = other DNA; mol_type = other DNA
tacttcagcggtatccctatg

SEQ ID NO: 28843 - DNA, 21 bp, synthetic construct
  source 1..21: mol_type = other DNA; mol_type = other DNA
tacgcacgaacaggtcagaac

SEQ ID NO: 28844 - DNA, 21 bp, synthetic construct
  source 1..21: mol_type = other DNA; mol_type = other DNA
tattttagcggggagcacgat

SEQ ID NO: 28845 - DNA, 21 bp, synthetic construct
  source 1..21: mol_type = other DNA; mol_type = other DNA
ttgtgtaagccatgcctaatc

SEQ ID NO: 28846 - DNA, 21 bp, synthetic construct
  source 1..21: mol_type = other DNA; mol_type = other DNA
tatgcacggatcggcatgaac

SEQ ID NO: 28847 - DNA, 21 bp, synthetic construct
  source 1..21: mol_type = other DNA; mol_type = other DNA
tactggacaggattaaaagac

SEQ ID NO: 28848 - DNA, 21 bp, synthetic construct
  source 1..21: mol_type = other DNA; mol_type = other DNA
ttttcgcgtcttaacgccaac

SEQ ID NO: 28849 - DNA, 21 bp, synthetic construct
  source 1..21: mol_type = other DNA; mol_type = other DNA
cacaattccacgaatggtatc

SEQ ID NO: 28850 - DNA, 21 bp, synthetic construct
  source 1..21: mol_type = other DNA; mol_type = other DNA
agggtcggcggagattgtccg

SEQ ID NO: 28851 - DNA, 21 bp, synthetic construct
  source 1..21: mol_type = other DNA; mol_type = other DNA
caggatggctacagctcgtgg

SEQ ID NO: 28852 - DNA, 21 bp, synthetic construct
  source 1..21: mol_type = other DNA; mol_type = other DNA
ttggctaaaaccggaatgaat

SEQ ID NO: 28853 - DNA, 21 bp, synthetic construct
  source 1..21: mol_type = other DNA; mol_type = other DNA
gaacccgagtcgagagattgg

SEQ ID NO: 28854 - DNA, 21 bp, synthetic construct
  source 1..21: mol_type = other DNA; mol_type = other DNA
tatttctccggccgcctagat

SEQ ID NO: 28855 - DNA, 21 bp, synthetic construct
  source 1..21: mol_type = other DNA; mol_type = other DNA
tttgaagggagggggtggaat

SEQ ID NO: 28856 - DNA, 21 bp, synthetic construct
  source 1..21: mol_type = other DNA; mol_type = other DNA
cgtgaagagggagttggatgg

SEQ ID NO: 28857 - DNA, 21 bp, synthetic construct
  source 1..21: mol_type = other DNA; mol_type = other DNA
atgacaggtacaagttgtgga

SEQ ID NO: 28858 - DNA, 21 bp, synthetic construct
  source 1..21: mol_type = other DNA; mol_type = other DNA
tatcatcgtctcggagacacg

SEQ ID NO: 28859 - DNA, 21 bp, synthetic construct
  source 1..21: mol_type = other DNA; mol_type = other DNA
tactggacagggatgcaggcg

SEQ ID NO: 28860 - DNA, 21 bp, synthetic construct
  source 1..21: mol_type = other DNA; mol_type = other DNA
ggcagtgaaaacgtgagatgg

SEQ ID NO: 28861 - DNA, 21 bp, synthetic construct
  source 1..21: mol_type = other DNA; mol_type = other DNA
tactttacagggcagcataac

SEQ ID NO: 28862 - DNA, 21 bp, synthetic construct
  source 1..21: mol_type = other DNA; mol_type = other DNA
tgcgatggttcattcaaagcg

SEQ ID NO: 28863 - DNA, 21 bp, synthetic construct
  source 1..21: mol_type = other DNA; mol_type = other DNA
gactcctttagaggctacgac

SEQ ID NO: 28864 - DNA, 21 bp, synthetic construct
  source 1..21: mol_type = other DNA; mol_type = other DNA
tgtaaaccattgccaagtggg

SEQ ID NO: 28865 - DNA, 21 bp, synthetic construct
  source 1..21: mol_type = other DNA; mol_type = other DNA
ttggcccggagtggtgagaac

SEQ ID NO: 28866 - DNA, 21 bp, synthetic construct
  source 1..21: mol_type = other DNA; mol_type = other DNA
gttgagagtgtaaacgggatt

SEQ ID NO: 28867 - DNA, 21 bp, synthetic construct
  source 1..21: mol_type = other DNA; mol_type = other DNA
tatgcccgcctcaatgttaac

SEQ ID NO: 28868 - DNA, 21 bp, synthetic construct
  source 1..21: mol_type = other DNA; mol_type = other DNA
tattttactgggatccatgga

SEQ ID NO: 28869 - DNA, 21 bp, synthetic construct
  source 1..21: mol_type = other DNA; mol_type = other DNA
cgtgatgggcaaagcagttgg

SEQ ID NO: 28870 - DNA, 21 bp, synthetic construct
  source 1..21: mol_type = other DNA
tatacaagggtatcagataat

SEQ ID NO: 28871 - DNA, 21 bp, synthetic construct
  source 1..21: mol_type = other DNA; mol_type = other DNA
agagatgagttcaaccactgg

SEQ ID NO: 28872 - DNA, 21 bp, synthetic construct
  source 1..21: mol_type = other DNA; mol_type = other DNA
agggaagagtatacagcatat

SEQ ID NO: 28873 - DNA, 21 bp, synthetic construct
  source 1..21: mol_type = other DNA; mol_type = other DNA
tttttctcgggtatcagggac

SEQ ID NO: 28874 - DNA, 21 bp, synthetic construct
  source 1..21: mol_type = other DNA; mol_type = other DNA
tactcaaaaaacggaatgaac

SEQ ID NO: 28875 - DNA, 21 bp, synthetic construct
  source 1..21: mol_type = other DNA; mol_type = other DNA
tccatgtctgacagaacctgg

SEQ ID NO: 28876 - DNA, 21 bp, synthetic construct
  source 1..21: mol_type = other DNA; mol_type = other DNA
tatgctaggaacggtccgaac

SEQ ID NO: 28877 - DNA, 21 bp, synthetic construct
  source 1..21: mol_type = other DNA; mol_type = other DNA
tacgctagatccgggaacaac

SEQ ID NO: 28878 - DNA, 21 bp, synthetic construct
  source 1..21: mol_type = other DNA; mol_type = other DNA
ggtagtgggacgtcgcattgg

SEQ ID NO: 28879 - DNA, 21 bp, synthetic construct
  source 1..21: mol_type = other DNA; mol_type = other DNA
tacttctccggtaagataaca

SEQ ID NO: 28880 - DNA, 21 bp, synthetic construct
  source 1..21: mol_type = other DNA; mol_type = other DNA
tatagccgtataggtggtaac

SEQ ID NO: 28881 - DNA, 21 bp, synthetic construct
  source 1..21: mol_type = other DNA; mol_type = other DNA
agtccagagacacgttgccca

SEQ ID NO: 28882 - DNA, 21 bp, synthetic construct
  source 1..21: mol_type = other DNA; mol_type = other DNA
tactcacggggaggtccgaac

SEQ ID NO: 28883 - DNA, 21 bp, synthetic construct
  source 1..21: mol_type = other DNA; mol_type = other DNA
aaggacgactttacgggatac

SEQ ID NO: 28884 - DNA, 21 bp, synthetic construct
  source 1..21: mol_type = other DNA; mol_type = other DNA
attgccagagagggttgggat

SEQ ID NO: 28885 - DNA, 21 bp, synthetic construct
  source 1..21: mol_type = other DNA; mol_type = other DNA
ggatgcggcactaagtttggt

SEQ ID NO: 28886 - DNA, 21 bp, synthetic construct
  source 1..21: mol_type = other DNA; mol_type = other DNA
agggacggcactagcacgtgg

SEQ ID NO: 28887 - DNA, 21 bp, synthetic construct
  source 1..21: mol_type = other DNA; mol_type = other DNA
tattttacaggcgttcaaggc

SEQ ID NO: 28888 - DNA, 21 bp, synthetic construct
  source 1..21: mol_type = other DNA; mol_type = other DNA
tttagtagacttaatagcaac

SEQ ID NO: 28889 - DNA, 21 bp, synthetic construct
  source 1..21: mol_type = other DNA; mol_type = other DNA
tattctagagccgggcttaat

SEQ ID NO: 28890 - DNA, 21 bp, synthetic construct
  source 1..21: mol_type = other DNA; mol_type = other DNA
ataaactctaccaacggtatt

SEQ ID NO: 28891 - DNA, 21 bp, synthetic construct
  source 1..21: mol_type = other DNA; mol_type = other DNA
tattggagtaaggttatggag

SEQ ID NO: 28892 - DNA, 21 bp, synthetic construct
  source 1..21: mol_type = other DNA; mol_type = other DNA
gtcgaggcgaccaatggagtt

SEQ ID NO: 28893 - DNA, 21 bp, synthetic construct
  source 1..21: mol_type = other DNA; mol_type = other DNA
tatagtaggattggtcaaaac

SEQ ID NO: 28894 - DNA, 21 bp, synthetic construct
  source 1..21: mol_type = other DNA; mol_type = other DNA
ctcccgggcgtaaagtgcccg

SEQ ID NO: 28895 - DNA, 21 bp, synthetic construct
  source 1..21: mol_type = other DNA; mol_type = other DNA
tgcgcagtataccttcacgaa

SEQ ID NO: 28896 - DNA, 21 bp, synthetic construct
  source 1..21: mol_type = other DNA; mol_type = other DNA
tacgctaagacatcgctcaac

SEQ ID NO: 28897 - DNA, 21 bp, synthetic construct
  source 1..21: mol_type = other DNA; mol_type = other DNA
gacatggaatcatacgactgg

SEQ ID NO: 28898 - DNA, 21 bp, synthetic construct
  source 1..21: mol_type = other DNA; mol_type = other DNA
atgtgggatggaacagacgca

SEQ ID NO: 28899 - DNA, 21 bp, synthetic construct
  source 1..21: mol_type = other DNA; mol_type = other DNA
cgggactatgaggtttatccg

SEQ ID NO: 28900 - DNA, 21 bp, synthetic construct
  source 1..21: mol_type = other DNA; mol_type = other DNA
taccacaaatctcagcagtat

SEQ ID NO: 28901 - DNA, 21 bp, synthetic construct
  source 1..21: mol_type = other DNA; mol_type = other DNA
cgtaatttcgatgcgtatcca

SEQ ID NO: 28902 - DNA, 21 bp, synthetic construct
  source 1..21: mol_type = other DNA; mol_type = other DNA
ttatcacgagtcgcaatgaat

SEQ ID NO: 28903 - DNA, 21 bp, synthetic construct
  source 1..21: mol_type = other DNA; mol_type = other DNA
taccataaagcgatgcaaaac

SEQ ID NO: 28904 - DNA, 21 bp, synthetic construct
  source 1..21: mol_type = other DNA; mol_type = other DNA
cgcagtgagttccactcattt

SEQ ID NO: 28905 - DNA, 21 bp, synthetic construct
  source 1..21: mol_type = other DNA; mol_type = other DNA
atcgattcgactaatggtgtt

SEQ ID NO: 28906 - DNA, 21 bp, synthetic construct
  source 1..21: mol_type = other DNA; mol_type = other DNA
ataatgggagatcgcaaatgg

SEQ ID NO: 28907 - DNA, 21 bp, synthetic construct
  source 1..21: mol_type = other DNA; mol_type = other DNA
tacttcgcaggtaaacgcgaa

SEQ ID NO: 28908 - DNA, 21 bp, synthetic construct
  source 1..21: mol_type = other DNA; mol_type = other DNA
tacagtaaaagtaatgccaat

SEQ ID NO: 28909 - DNA, 21 bp, synthetic construct
  source 1..21: mol_type = other DNA; mol_type = other DNA
agagatgagtttcgcacatat

SEQ ID NO: 28910 - DNA, 21 bp, synthetic construct
  source 1..21: mol_type = other DNA; mol_type = other DNA
tacgtgagatcgcaaaacctt

SEQ ID NO: 28911 - DNA, 21 bp, synthetic construct
  source 1..21: mol_type = other DNA; mol_type = other DNA
tactacacaggtagggtgagt

SEQ ID NO: 28912 - DNA, 21 bp, synthetic construct
  source 1..21: mol_type = other DNA; mol_type = other DNA
ttttctaggacaggcttcaat

SEQ ID NO: 28913 - DNA, 21 bp, synthetic construct
  source 1..21: mol_type = other DNA; mol_type = other DNA
agaagcagcgacgcatacccg

SEQ ID NO: 28914 - DNA, 21 bp, synthetic construct
  source 1..21: mol_type = other DNA; mol_type = other DNA
tttttcacaggtagaattgac

SEQ ID NO: 28915 - DNA, 21 bp, synthetic construct
  source 1..21: mol_type = other DNA; mol_type = other DNA
tattctaggaaaaatgataat

SEQ ID NO: 28916 - DNA, 21 bp, synthetic construct
  source 1..21: mol_type = other DNA; mol_type = other DNA
ttcttttcaggacggatagaa

SEQ ID NO: 28917 - DNA, 21 bp, synthetic construct
  source 1..21: mol_type = other DNA; mol_type = other DNA
attgcgagtacaaacgggatc

SEQ ID NO: 28918 - DNA, 21 bp, synthetic construct
  source 1..21: mol_type = other DNA; mol_type = other DNA
tatagtcgcattaacgtgaac

SEQ ID NO: 28919 - DNA, 21 bp, synthetic construct
  source 1..21: mol_type = other DNA; mol_type = other DNA
tactggacagggaaaccggat

SEQ ID NO: 28920 - DNA, 21 bp, synthetic construct
  source 1..21: mol_type = other DNA; mol_type = other DNA
tacagtagattagggttcaac

SEQ ID NO: 28921 - DNA, 21 bp, synthetic construct
  source 1..21: mol_type = other DNA; mol_type = other DNA
tatgcacggactggagggaat

SEQ ID NO: 28922 - DNA, 21 bp, synthetic construct
  source 1..21: mol_type = other DNA; mol_type = other DNA
tatagtaaattacacactcat

SEQ ID NO: 28923 - DNA, 21 bp, synthetic construct
  source 1..21: mol_type = other DNA; mol_type = other DNA
ttctcaaaggttggagctaat

SEQ ID NO: 28924 - DNA, 21 bp, synthetic construct
  source 1..21: mol_type = other DNA; mol_type = other DNA
ttctccaggctgggaacaaac

SEQ ID NO: 28925 - DNA, 21 bp, synthetic construct
  source 1..21: mol_type = other DNA; mol_type = other DNA
cgcgatgagttccgtacgtac

SEQ ID NO: 28926 - DNA, 21 bp, synthetic construct
  source 1..21: mol_type = other DNA; mol_type = other DNA
ttagccaaaggtgggcacaac

SEQ ID NO: 28927 - DNA, 21 bp, synthetic construct
  source 1..21: mol_type = other DNA; mol_type = other DNA
ttcagtcggttgtcccctgta

SEQ ID NO: 28928 - DNA, 21 bp, synthetic construct
  source 1..21: mol_type = other DNA; mol_type = other DNA
tatttctcaggccgtccggac

SEQ ID NO: 28929 - DNA, 21 bp, synthetic construct
  source 1..21: mol_type = other DNA; mol_type = other DNA
tatcacgccagacagattaat

SEQ ID NO: 28930 - DNA, 21 bp, synthetic construct
  source 1..21: mol_type = other DNA; mol_type = other DNA
tatttcacaggccggacgcaa

SEQ ID NO: 28931 - DNA, 21 bp, synthetic construct
  source 1..21: mol_type = other DNA; mol_type = other DNA
ttctggtcaggtgtgaaggac

SEQ ID NO: 28932 - DNA, 21 bp, synthetic construct
  source 1..21: mol_type = other DNA; mol_type = other DNA
cgaggcaatgagtgctggtcc

SEQ ID NO: 28933 - DNA, 21 bp, synthetic construct
  source 1..21: mol_type = other DNA; mol_type = other DNA
ttacacagggatggaataaac

SEQ ID NO: 28934 - DNA, 21 bp, synthetic construct
  source 1..21: mol_type = other DNA; mol_type = other DNA
tgcaagccacgaacgtcggaa

SEQ ID NO: 28935 - DNA, 21 bp, synthetic construct
  source 1..21: mol_type = other DNA; mol_type = other DNA
ttcttctcaggcgttaaggat

SEQ ID NO: 28936 - DNA, 21 bp, synthetic construct
  source 1..21: mol_type = other DNA; mol_type = other DNA
atatggtccacaaatggtgtt

SEQ ID NO: 28937 - DNA, 21 bp, synthetic construct
  source 1..21: mol_type = other DNA; mol_type = other DNA
ttaagtaagatgaatttcaac

SEQ ID NO: 28938 - DNA, 21 bp, synthetic construct
  source 1..21: mol_type = other DNA; mol_type = other DNA
tatgtgaagagtcaaggaagc

SEQ ID NO: 28939 - DNA, 21 bp, synthetic construct
  source 1..21: mol_type = other DNA; mol_type = other DNA
tgcaagatgcccatgagggat

SEQ ID NO: 28940 - DNA, 21 bp, synthetic construct
  source 1..21: mol_type = other DNA; mol_type = other DNA
tattccaggcaaggagtaaac

SEQ ID NO: 28941 - DNA, 21 bp, synthetic construct
  source 1..21: mol_type = other DNA; mol_type = other DNA
agcgatggttttagcaagtgg

SEQ ID NO: 28942 - DNA, 21 bp, synthetic construct
  source 1..21: mol_type = other DNA; mol_type = other DNA
ggcgctgagggcgtacgatgg

SEQ ID NO: 28943 - DNA, 21 bp, synthetic construct
  source 1..21: mol_type = other DNA; mol_type = other DNA
tgtggaggtctctcacgcgga

SEQ ID NO: 28944 - DNA, 21 bp, synthetic construct
  source 1..21: mol_type = other DNA; mol_type = other DNA
tacagtaagggcaaccccaat

SEQ ID NO: 28945 - DNA, 21 bp, synthetic construct
  source 1..21: mol_type = other DNA; mol_type = other DNA
ttatcgaaactaggaaataac

SEQ ID NO: 28946 - DNA, 21 bp, synthetic construct
  source 1..21: mol_type = other DNA; mol_type = other DNA
ttgcaccggttaggagagcac

SEQ ID NO: 28947 - DNA, 21 bp, synthetic construct
  source 1..21: mol_type = other DNA; mol_type = other DNA
ccttatgcccggagcccggaa

SEQ ID NO: 28948 - DNA, 21 bp, synthetic construct
  source 1..21: mol_type = other DNA; mol_type = other DNA
tggtacagtggtattagagaa

SEQ ID NO: 28949 - DNA, 21 bp, synthetic construct
  source 1..21: mol_type = other DNA; mol_type = other DNA
tacagccgaatacaggctaac

SEQ ID NO: 28950 - DNA, 21 bp, synthetic construct
  source 1..21: mol_type = other DNA; mol_type = other DNA
ttcagtcggctaaacttaaat

SEQ ID NO: 28951 - DNA, 21 bp, synthetic construct
  source 1..21: mol_type = other DNA; mol_type = other DNA
tgcaaaccgcaaggtgggacc

SEQ ID NO: 28952 - DNA, 21 bp, synthetic construct
  source 1..21: mol_type = other DNA; mol_type = other DNA
gtgagcacccacacttgtgcg

SEQ ID NO: 28953 - DNA, 21 bp, synthetic construct
  source 1..21: mol_type = other DNA; mol_type = other DNA
ggagaggagcatgtaagatgg

SEQ ID NO: 28954 - DNA, 21 bp, synthetic construct
  source 1..21: mol_type = other DNA; mol_type = other DNA
aggggagaaagtcatgggtgg

SEQ ID NO: 28955 - DNA, 21 bp, synthetic construct
  source 1..21: mol_type = other DNA; mol_type = other DNA
tacgagagcactaatggagtc

SEQ ID NO: 28956 - DNA, 21 bp, synthetic construct
  source 1..21: mol_type = other DNA; mol_type = other DNA
tacttctccggggttcaccaa

SEQ ID NO: 28957 - DNA, 21 bp, synthetic construct
  source 1..21: mol_type = other DNA; mol_type = other DNA
ctctcaaagagctcagtgaat

SEQ ID NO: 28958 - DNA, 21 bp, synthetic construct
  source 1..21: mol_type = other DNA; mol_type = other DNA
gtaatgcaggaccggacgtgg

SEQ ID NO: 28959 - DNA, 21 bp, synthetic construct
  source 1..21: mol_type = other DNA; mol_type = other DNA
ccttatgctagatcaattgaa

SEQ ID NO: 28960 - DNA, 21 bp, synthetic construct
  source 1..21: mol_type = other DNA; mol_type = other DNA
tacgtgaggtccgatacgttt

SEQ ID NO: 28961 - DNA, 21 bp, synthetic construct
  source 1..21: mol_type = other DNA; mol_type = other DNA
accatgagagatgcatatcca

SEQ ID NO: 28962 - DNA, 21 bp, synthetic construct
  source 1..21: mol_type = other DNA; mol_type = other DNA
cgtacttatgacagctttgct

SEQ ID NO: 28963 - DNA, 21 bp, synthetic construct
  source 1..21: mol_type = other DNA; mol_type = other DNA
ttatgggatgggactaatgcg

SEQ ID NO: 28964 - DNA, 21 bp, synthetic construct
  source 1..21: mol_type = other DNA; mol_type = other DNA
tgtggcggaggtaagccgcct

SEQ ID NO: 28965 - DNA, 21 bp, synthetic construct
  source 1..21: mol_type = other DNA; mol_type = other DNA
aggggtgactttcatatgtat

SEQ ID NO: 28966 - DNA, 21 bp, synthetic construct
  source 1..21: mol_type = other DNA; mol_type = other DNA
ataatgtcgacaaatgggata

SEQ ID NO: 28967 - DNA, 21 bp, synthetic construct
  source 1..21: mol_type = other DNA; mol_type = other DNA
tacagccgtatcggacacaac

SEQ ID NO: 28968 - DNA, 21 bp, synthetic construct
  source 1..21: mol_type = other DNA; mol_type = other DNA
gtgtgccgtccatgtgctggc

SEQ ID NO: 28969 - DNA, 21 bp, synthetic construct
  source 1..21: mol_type = other DNA; mol_type = other DNA
aaagatgagttcacagtttat

SEQ ID NO: 28970 - DNA, 21 bp, synthetic construct
  source 1..21: mol_type = other DNA; mol_type = other DNA
tatagcaggatcgcccccaat

SEQ ID NO: 28971 - DNA, 21 bp, synthetic construct
  source 1..21: mol_type = other DNA; mol_type = other DNA
tactggtcgggcttagtggaa

SEQ ID NO: 28972 - DNA, 21 bp, synthetic construct
  source 1..21: mol_type = other DNA; mol_type = other DNA
aaatacgcattctcaacggag

SEQ ID NO: 28973 - DNA, 21 bp, synthetic construct
  source 1..21: mol_type = other DNA; mol_type = other DNA
tactcgcggataaatgaaaac

SEQ ID NO: 28974 - DNA, 21 bp, synthetic construct
  source 1..21: mol_type = other DNA; mol_type = other DNA
ttacccaggaccggaaattgg

SEQ ID NO: 28975 - DNA, 21 bp, synthetic construct
  source 1..21: mol_type = other DNA; mol_type = other DNA
tactatactggaatccaagcg

SEQ ID NO: 28976 - DNA, 21 bp, synthetic construct
  source 1..21: mol_type = other DNA; mol_type = other DNA
cgcgaggagttcgtgagctat

SEQ ID NO: 28977 - DNA, 21 bp, synthetic construct
  source 1..21: mol_type = other DNA; mol_type = other DNA
tattttacgaaacaggtcgac

SEQ ID NO: 28978 - DNA, 21 bp, synthetic construct
  source 1..21: mol_type = other DNA; mol_type = other DNA
tccgctagcacaaatggtatt

SEQ ID NO: 28979 - DNA, 21 bp, synthetic construct
  source 1..21: mol_type = other DNA; mol_type = other DNA
tacttttcagggactaagtta

SEQ ID NO: 28980 - DNA, 21 bp, synthetic construct
  source 1..21: mol_type = other DNA; mol_type = other DNA
tactggtcaggcttgttagaa

SEQ ID NO: 28981 - DNA, 21 bp, synthetic construct
  source 1..21: mol_type = other DNA; mol_type = other DNA
agagaaggcacgtcatattgg

SEQ ID NO: 28982 - DNA, 21 bp, synthetic construct
  source 1..21: mol_type = other DNA; mol_type = other DNA
tacgtacgtagtgattttagg

SEQ ID NO: 28983 - DNA, 21 bp, synthetic construct
  source 1..21: mol_type = other DNA; mol_type = other DNA
tactcgcgtataggccctggt

SEQ ID NO: 28984 - DNA, 21 bp, synthetic construct
  source 1..21: mol_type = other DNA; mol_type = other DNA
tgccgggaaggaacccgttta

SEQ ID NO: 28985 - DNA, 21 bp, synthetic construct
  source 1..21: mol_type = other DNA; mol_type = other DNA
tactggagccaggttaaggag

SEQ ID NO: 28986 - DNA, 21 bp, synthetic construct
  source 1..21: mol_type = other DNA; mol_type = other DNA
tatagtcgtatatctcccaat

SEQ ID NO: 28987 - DNA, 21 bp, synthetic construct
  source 1..21: mol_type = other DNA; mol_type = other DNA
tacagcagggttcaggacgac

SEQ ID NO: 28988 - DNA, 21 bp, synthetic construct
  source 1..21: mol_type = other DNA; mol_type = other DNA
gtgtctacacatgagtgcgct

SEQ ID NO: 28989 - DNA, 21 bp, synthetic construct
  source 1..21: mol_type = other DNA; mol_type = other DNA
tttgcccgaacgggtgttaat

SEQ ID NO: 28990 - DNA, 21 bp, synthetic construct
  source 1..21: mol_type = other DNA; mol_type = other DNA
tatgcaaggatgggtcctgac

SEQ ID NO: 28991 - DNA, 21 bp, synthetic construct
  source 1..21: mol_type = other DNA; mol_type = other DNA
tatagccgtatgaacgaaaat

SEQ ID NO: 28992 - DNA, 21 bp, synthetic construct
  source 1..21: mol_type = other DNA; mol_type = other DNA
tatagcaaggctaacccaaac

SEQ ID NO: 28993 - DNA, 21 bp, synthetic construct
  source 1..21: mol_type = other DNA; mol_type = other DNA
cacttttccactaatggtata

SEQ ID NO: 28994 - DNA, 21 bp, synthetic construct
  source 1..21: mol_type = other DNA; mol_type = other DNA
tatgcccgcattggtgttaat

SEQ ID NO: 28995 - DNA, 21 bp, synthetic construct
  source 1..21: mol_type = other DNA; mol_type = other DNA
tattcaaggctcttaccaatg

SEQ ID NO: 28996 - DNA, 21 bp, synthetic construct
  source 1..21: mol_type = other DNA; mol_type = other DNA
tatagtcggattgcgccggat

SEQ ID NO: 28997 - DNA, 21 bp, synthetic construct
  source 1..21: mol_type = other DNA; mol_type = other DNA
taccacaagtcacagtcttat

SEQ ID NO: 28998 - DNA, 21 bp, synthetic construct
  source 1..21: mol_type = other DNA; mol_type = other DNA
tacttcagtggccagcattcg

SEQ ID NO: 28999 - DNA, 21 bp, synthetic construct
  source 1..21: mol_type = other DNA; mol_type = other DNA
aggagcgactttaccacgtat

SEQ ID NO: 29000 - DNA, 21 bp, synthetic construct
  source 1..21: mol_type = other DNA; mol_type = other DNA
aaggacgactacacagttttt

SEQ ID NO: 29001 - DNA, 21 bp, synthetic construct
  source 1..21: mol_type = other DNA; mol_type = other DNA
ttattacagtcgacgacctgg

SEQ ID NO: 29002 - DNA, 21 bp, synthetic construct
  source 1..21: mol_type = other DNA; mol_type = other DNA
tatttccatggtcttatagcg

SEQ ID NO: 29003 - DNA, 21 bp, synthetic construct
  source 1..21: mol_type = other DNA; mol_type = other DNA
tattatagtggccgcatagag

SEQ ID NO: 29004 - DNA, 21 bp, synthetic construct
  source 1..21: mol_type = other DNA; mol_type = other DNA
tactttactaagcaaattgac

SEQ ID NO: 29005 - DNA, 21 bp, synthetic construct
  source 1..21: mol_type = other DNA; mol_type = other DNA
ccatatgcggtgtcaccacta

SEQ ID NO: 29006 - DNA, 21 bp, synthetic construct
  source 1..21: mol_type = other DNA; mol_type = other DNA
gtgctgtccagtcagggttgg

SEQ ID NO: 29007 - DNA, 21 bp, synthetic construct
  source 1..21: mol_type = other DNA; mol_type = other DNA
ttcaactcgacaaatggcgtt

SEQ ID NO: 29008 - DNA, 21 bp, synthetic construct
  source 1..21: mol_type = other DNA; mol_type = other DNA
tacgcaaaaggagagccatgc

SEQ ID NO: 29009 - DNA, 21 bp, synthetic construct
  source 1..21: mol_type = other DNA; mol_type = other DNA
tatcacgcgcgtgcacccaac

SEQ ID NO: 29010 - DNA, 21 bp, synthetic construct
  source 1..21: mol_type = other DNA; mol_type = other DNA
ggagatggcagctcaaggtgg

SEQ ID NO: 29011 - DNA, 21 bp, synthetic construct
  source 1..21: mol_type = other DNA; mol_type = other DNA
ggtgaagaaggtgtgagatgg

SEQ ID NO: 29012 - DNA, 21 bp, synthetic construct
  source 1..21: mol_type = other DNA; mol_type = other DNA
cgagatgaagttacaagctgg

SEQ ID NO: 29013 - DNA, 21 bp, synthetic construct
  source 1..21: mol_type = other DNA; mol_type = other DNA
tacttcgcaggaattatcgcc

SEQ ID NO: 29014 - DNA, 21 bp, synthetic construct
  source 1..21: mol_type = other DNA; mol_type = other DNA
agaggcgactataccccctgg

SEQ ID NO: 29015 - DNA, 21 bp, synthetic construct
  source 1..21: mol_type = other DNA; mol_type = other DNA
ttgcatcgcaatacccagaac

SEQ ID NO: 29016 - DNA, 21 bp, synthetic construct
  source 1..21: mol_type = other DNA; mol_type = other DNA
ctctcaagggcgagtcgtgat

SEQ ID NO: 29017 - DNA, 21 bp, synthetic construct
  source 1..21: mol_type = other DNA; mol_type = other DNA
agagccctagagtgctgctac

SEQ ID NO: 29018 - DNA, 21 bp, synthetic construct
  source 1..21: mol_type = other DNA; mol_type = other DNA
tattcgcgcatcggcccacag

SEQ ID NO: 29019 - DNA, 21 bp, synthetic construct
  source 1..21: mol_type = other DNA; mol_type = other DNA
tttttcagtggcagaattgag

SEQ ID NO: 29020 - DNA, 21 bp, synthetic construct
  source 1..21: mol_type = other DNA; mol_type = other DNA
actatgcgggacgcgtaccct

SEQ ID NO: 29021 - DNA, 21 bp, synthetic construct
  source 1..21: mol_type = other DNA; mol_type = other DNA
tactcaagagtaggggcaaat

SEQ ID NO: 29022 - DNA, 21 bp, synthetic construct
  source 1..21: mol_type = other DNA; mol_type = other DNA
tactacacaggccggctcgac

SEQ ID NO: 29023 - DNA, 21 bp, synthetic construct
  source 1..21: mol_type = other DNA; mol_type = other DNA
cgtgatgatttttctctctgg

SEQ ID NO: 29024 - DNA, 21 bp, synthetic construct
  source 1..21: mol_type = other DNA; mol_type = other DNA
tattactccggcgttaagcaa

SEQ ID NO: 29025 - DNA, 21 bp, synthetic construct
  source 1..21: mol_type = other DNA; mol_type = other DNA
ctgcaaaagccctgcttgacg

SEQ ID NO: 29026 - DNA, 21 bp, synthetic construct
  source 1..21: mol_type = other DNA; mol_type = other DNA
ataaagagcactaatggtgtc

SEQ ID NO: 29027 - DNA, 21 bp, synthetic construct
  source 1..21: mol_type = other DNA; mol_type = other DNA
cgagacggaatgagcagttgg

SEQ ID NO: 29028 - DNA, 21 bp, synthetic construct
  source 1..21: mol_type = other DNA; mol_type = other DNA
tacttcagtcttaaggtggaa

SEQ ID NO: 29029 - DNA, 21 bp, synthetic construct
  source 1..21: mol_type = other DNA; mol_type = other DNA
tacttcagtggacagtcggag

SEQ ID NO: 29030 - DNA, 21 bp, synthetic construct
  source 1..21: mol_type = other DNA; mol_type = other DNA
tgggcgaagtctggacctaat

SEQ ID NO: 29031 - DNA, 21 bp, synthetic construct
  source 1..21: mol_type = other DNA; mol_type = other DNA
cgcgcagccgaggtttatcca

SEQ ID NO: 29032 - DNA, 21 bp, synthetic construct
  source 1..21: mol_type = other DNA; mol_type = other DNA
gatatgatgtcgcgtgattgg

SEQ ID NO: 29033 - DNA, 21 bp, synthetic construct
  source 1..21: mol_type = other DNA; mol_type = other DNA
ttcatgacgggaaaatgtccc

SEQ ID NO: 29034 - DNA, 21 bp, synthetic construct
  source 1..21: mol_type = other DNA; mol_type = other DNA
tatttcagcggccaaacttcg

SEQ ID NO: 29035 - DNA, 21 bp, synthetic construct
  source 1..21: mol_type = other DNA; mol_type = other DNA
agggatggtatgtcgtcatgg

SEQ ID NO: 29036 - DNA, 21 bp, synthetic construct
  source 1..21: mol_type = other DNA; mol_type = other DNA
tacacgcgagttagtgacaac

SEQ ID NO: 29037 - DNA, 21 bp, synthetic construct
  source 1..21: mol_type = other DNA; mol_type = other DNA
tacgcacgtaacggccttaac

SEQ ID NO: 29038 - DNA, 21 bp, synthetic construct
  source 1..21: mol_type = other DNA; mol_type = other DNA
tactgggcgggcgtcagagat

SEQ ID NO: 29039 - DNA, 21 bp, synthetic construct
  source 1..21: mol_type = other DNA; mol_type = other DNA
atcatggaggaccgcgtatgg

SEQ ID NO: 29040 - DNA, 21 bp, synthetic construct
  source 1..21: mol_type = other DNA; mol_type = other DNA
tatattaaaagtcaatcttgt

SEQ ID NO: 29041 - DNA, 21 bp, synthetic construct
  source 1..21: mol_type = other DNA; mol_type = other DNA
tattggtcggggatgcatgag

SEQ ID NO: 29042 - DNA, 21 bp, synthetic construct
  source 1..21: mol_type = other DNA; mol_type = other DNA
tacgcgcgcttaggtaataat

SEQ ID NO: 29043 - DNA, 21 bp, synthetic construct
  source 1..21: mol_type = other DNA; mol_type = other DNA
cgagacgatttttcaatatat

SEQ ID NO: 29044 - DNA, 21 bp, synthetic construct
  source 1..21: mol_type = other DNA; mol_type = other DNA
tacgcaagagctggcccagac

SEQ ID NO: 29045 - DNA, 21 bp, synthetic construct
  source 1..21: mol_type = other DNA; mol_type = other DNA
taccacagattgcatcccctt

SEQ ID NO: 29046 - DNA, 21 bp, synthetic construct
  source 1..21: mol_type = other DNA; mol_type = other DNA
tactctcgcacaggagtaaac

SEQ ID NO: 29047 - DNA, 21 bp, synthetic construct
  source 1..21: mol_type = other DNA; mol_type = other DNA
tatgctaaaaacgggaccaat

SEQ ID NO: 29048 - DNA, 21 bp, synthetic construct
  source 1..21: mol_type = other DNA; mol_type = other DNA
tatgtccggtcgcaacccatc

SEQ ID NO: 29049 - DNA, 21 bp, synthetic construct
  source 1..21: mol_type = other DNA; mol_type = other DNA
tatgcgaagactggcgggaac

SEQ ID NO: 29050 - DNA, 21 bp, synthetic construct
  source 1..21: mol_type = other DNA; mol_type = other DNA
tgtaataagccaggtacagcc

SEQ ID NO: 29051 - DNA, 21 bp, synthetic construct
  source 1..21: mol_type = other DNA; mol_type = other DNA
tactttagtggaaaaacattg

SEQ ID NO: 29052 - DNA, 21 bp, synthetic construct
  source 1..21: mol_type = other DNA; mol_type = other DNA
tacgcgaagggaaactggaac

SEQ ID NO: 29053 - DNA, 21 bp, synthetic construct
  source 1..21: mol_type = other DNA; mol_type = other DNA
cactctaggcttaacttgcag

SEQ ID NO: 29054 - DNA, 21 bp, synthetic construct
  source 1..21: mol_type = other DNA; mol_type = other DNA
tacttttcaggaaggcaggat

SEQ ID NO: 29055 - DNA, 21 bp, synthetic construct
  source 1..21: mol_type = other DNA; mol_type = other DNA
aggagctcggatgcttatcct

SEQ ID NO: 29056 - DNA, 21 bp, synthetic construct
  source 1..21: mol_type = other DNA; mol_type = other DNA
attgcaagaacaggatgggat

SEQ ID NO: 29057 - DNA, 21 bp, synthetic construct
  source 1..21: mol_type = other DNA; mol_type = other DNA
ggatgtatgacaaaatgtggg

SEQ ID NO: 29058 - DNA, 21 bp, synthetic construct
  source 1..21: mol_type = other DNA; mol_type = other DNA
tactttactggtatgactgct

SEQ ID NO: 29059 - DNA, 21 bp, synthetic construct
  source 1..21: mol_type = other DNA; mol_type = other DNA
tattctaggatccaaccaaac

SEQ ID NO: 29060 - DNA, 21 bp, synthetic construct
  source 1..21: mol_type = other DNA; mol_type = other DNA
tattggtcaaaggtacccgat

SEQ ID NO: 29061 - DNA, 21 bp, synthetic construct
  source 1..21: mol_type = other DNA; mol_type = other DNA
tgccggcctatgtgtaaaccg

SEQ ID NO: 29062 - DNA, 21 bp, synthetic construct
  source 1..21: mol_type = other DNA; mol_type = other DNA
ggctgcaggcccggtgacatt

SEQ ID NO: 29063 - DNA, 21 bp, synthetic construct
  source 1..21: mol_type = other DNA; mol_type = other DNA
agggatggaagctccagatgg

SEQ ID NO: 29064 - DNA, 21 bp, synthetic construct
  source 1..21: mol_type = other DNA; mol_type = other DNA
tacagcagaaccggctataac

SEQ ID NO: 29065 - DNA, 21 bp, synthetic construct
  source 1..21: mol_type = other DNA; mol_type = other DNA
tactcgagaattggaggcaat

SEQ ID NO: 29066 - DNA, 21 bp, synthetic construct
  source 1..21: mol_type = other DNA; mol_type = other DNA
tgtaaaccgatctgctgcgaa

SEQ ID NO: 29067 - DNA, 21 bp, synthetic construct
  source 1..21: mol_type = other DNA; mol_type = other DNA
tatagccgccttggggcgaac

SEQ ID NO: 29068 - DNA, 21 bp, synthetic construct
  source 1..21: mol_type = other DNA; mol_type = other DNA
tatttttcgggtagaacatcg

SEQ ID NO: 29069 - DNA, 21 bp, synthetic construct
  source 1..21: mol_type = other DNA; mol_type = other DNA
aaggatgattatacaagattc

SEQ ID NO: 29070 - DNA, 21 bp, synthetic construct
  source 1..21: mol_type = other DNA; mol_type = other DNA
tatagcaaaacaggagataac

SEQ ID NO: 29071 - DNA, 21 bp, synthetic construct
  source 1..21: mol_type = other DNA; mol_type = other DNA
ttcgccagaaccggtcataac

SEQ ID NO: 29072 - DNA, 21 bp, synthetic construct
  source 1..21: mol_type = other DNA; mol_type = other DNA
agggatgacttcagtatctat

SEQ ID NO: 29073 - DNA, 21 bp, synthetic construct
  source 1..21: mol_type = other DNA; mol_type = other DNA
cctcgttcaactaacggagta

SEQ ID NO: 29074 - DNA, 21 bp, synthetic construct
  source 1..21: mol_type = other DNA; mol_type = other DNA
tacgcacggagtggttcaaat

SEQ ID NO: 29075 - DNA, 21 bp, synthetic construct
  source 1..21: mol_type = other DNA; mol_type = other DNA
gtagacgattggagcccgttc

SEQ ID NO: 29076 - DNA, 21 bp, synthetic construct
  source 1..21: mol_type = other DNA; mol_type = other DNA
tatagtaagcagaatccaaat

SEQ ID NO: 29077 - DNA, 21 bp, synthetic construct
  source 1..21: mol_type = other DNA; mol_type = other DNA
tatagcaaaaacggttgcaat

SEQ ID NO: 29078 - DNA, 21 bp, synthetic construct
  source 1..21: mol_type = other DNA; mol_type = other DNA
gcaccaaatacggtcaaatgg

SEQ ID NO: 29079 - DNA, 21 bp, synthetic construct
  source 1..21: mol_type = other DNA; mol_type = other DNA
tattcaagaataggcataaat

SEQ ID NO: 29080 - DNA, 21 bp, synthetic construct
  source 1..21: mol_type = other DNA; mol_type = other DNA
tatttccacggaatggtagag

SEQ ID NO: 29081 - DNA, 21 bp, synthetic construct
  source 1..21: mol_type = other DNA; mol_type = other DNA
tacttcgctggtgtcagatca

SEQ ID NO: 29082 - DNA, 21 bp, synthetic construct
  source 1..21: mol_type = other DNA; mol_type = other DNA
tatagccggttgggagttaat

SEQ ID NO: 29083 - DNA, 21 bp, synthetic construct
  source 1..21: mol_type = other DNA; mol_type = other DNA
ttatcgagagctggtgataac

SEQ ID NO: 29084 - DNA, 21 bp, synthetic construct
  source 1..21: mol_type = other DNA; mol_type = other DNA
ctcttttctggacctaaatgt

SEQ ID NO: 29085 - DNA, 21 bp, synthetic construct
  source 1..21: mol_type = other DNA; mol_type = other DNA
atcatgtccgatcgcgagtgg

SEQ ID NO: 29086 - DNA, 21 bp, synthetic construct
  source 1..21: mol_type = other DNA; mol_type = other DNA
atgaccggcaagagctgctta

SEQ ID NO: 29087 - DNA, 21 bp, synthetic construct
  source 1..21: mol_type = other DNA; mol_type = other DNA
attatgagttcaaagttatgg

SEQ ID NO: 29088 - DNA, 21 bp, synthetic construct
  source 1..21: mol_type = other DNA; mol_type = other DNA
atctcaggaagaggctgggat

SEQ ID NO: 29089 - DNA, 21 bp, synthetic construct
  source 1..21: mol_type = other DNA; mol_type = other DNA
tatacccgcctgcaaaatacc

SEQ ID NO: 29090 - DNA, 21 bp, synthetic construct
  source 1..21: mol_type = other DNA; mol_type = other DNA
tacccttacggtacaaatgcg

SEQ ID NO: 29091 - DNA, 21 bp, synthetic construct
  source 1..21: mol_type = other DNA; mol_type = other DNA
tgcggacagaaatgtcgtccc

SEQ ID NO: 29092 - DNA, 21 bp, synthetic construct
  source 1..21: mol_type = other DNA; mol_type = other DNA
tgccgtacgaggtcgcctgag

SEQ ID NO: 29093 - DNA, 21 bp, synthetic construct
  source 1..21: mol_type = other DNA; mol_type = other DNA
accgaaagttctaacggggtt

SEQ ID NO: 29094 - DNA, 21 bp, synthetic construct
  source 1..21: mol_type = other DNA; mol_type = other DNA
tactacacaggcgtgaaaatg

SEQ ID NO: 29095 - DNA, 21 bp, synthetic construct
  source 1..21: mol_type = other DNA; mol_type = other DNA
tattcaagggttgggagtaac

SEQ ID NO: 29096 - DNA, 21 bp, synthetic construct
  source 1..21: mol_type = other DNA; mol_type = other DNA
tattcaagacttaacccaaac

SEQ ID NO: 29097 - DNA, 21 bp, synthetic construct
  source 1..21: mol_type = other DNA; mol_type = other DNA
tacgcccgcttaggcctcaac

SEQ ID NO: 29098 - DNA, 21 bp, synthetic construct
  source 1..21: mol_type = other DNA; mol_type = other DNA
agtctcgagagtagggattgg

SEQ ID NO: 29099 - DNA, 21 bp, synthetic construct
  source 1..21: mol_type = other DNA; mol_type = other DNA
ttcgcacgtggtggacctaac

SEQ ID NO: 29100 - DNA, 21 bp, synthetic construct
  source 1..21: mol_type = other DNA; mol_type = other DNA
cgagattcaaccaatgggatc

SEQ ID NO: 29101 - DNA, 21 bp, synthetic construct
  source 1..21: mol_type = other DNA; mol_type = other DNA
atgtcagagtttgtgagcttc

SEQ ID NO: 29102 - DNA, 21 bp, synthetic construct
  source 1..21: mol_type = other DNA; mol_type = other DNA
agacctgacagtgtacgctgg

SEQ ID NO: 29103 - DNA, 21 bp, synthetic construct
  source 1..21: mol_type = other DNA; mol_type = other DNA
tatgcaagacaaggacctaac

SEQ ID NO: 29104 - DNA, 21 bp, synthetic construct
  source 1..21: mol_type = other DNA; mol_type = other DNA
cccagtcgtctagaaaaccga

SEQ ID NO: 29105 - DNA, 21 bp, synthetic construct
  source 1..21: mol_type = other DNA; mol_type = other DNA
tactttgcgggcgtaaaggat

SEQ ID NO: 29106 - DNA, 21 bp, synthetic construct
  source 1..21: mol_type = other DNA; mol_type = other DNA
tattggacaggacagttagca

SEQ ID NO: 29107 - DNA, 21 bp, synthetic construct
  source 1..21: mol_type = other DNA; mol_type = other DNA
tacgcacgcactaatataaat

SEQ ID NO: 29108 - DNA, 21 bp, synthetic construct
  source 1..21: mol_type = other DNA
atcgcagaccacttgaggtgg

SEQ ID NO: 29109 - DNA, 21 bp, synthetic construct
  source 1..21: mol_type = other DNA; mol_type = other DNA
tacgctcgaaacggggagaat

SEQ ID NO: 29110 - DNA, 21 bp, synthetic construct
  source 1..21: mol_type = other DNA; mol_type = other DNA
agagacgagttcacgaaattc

SEQ ID NO: 29111 - DNA, 21 bp, synthetic construct
  source 1..21: mol_type = other DNA; mol_type = other DNA
tatgcaagaagtggcggcaac

SEQ ID NO: 29112 - DNA, 21 bp, synthetic construct
  source 1..21: mol_type = other DNA; mol_type = other DNA
atactggccgaccgtaattgg

SEQ ID NO: 29113 - DNA, 21 bp, synthetic construct
  source 1..21: mol_type = other DNA; mol_type = other DNA
tttagtaggattggacaaaac

SEQ ID NO: 29114 - DNA, 21 bp, synthetic construct
  source 1..21: mol_type = other DNA; mol_type = other DNA
tactcccgcatccagcccaat

SEQ ID NO: 29115 - DNA, 21 bp, synthetic construct
  source 1..21: mol_type = other DNA; mol_type = other DNA
ttagcaaagtcgggcacaaat

SEQ ID NO: 29116 - DNA, 21 bp, synthetic construct
  source 1..21: mol_type = other DNA; mol_type = other DNA
agttgtaaatcagggaacgcg

SEQ ID NO: 29117 - DNA, 21 bp, synthetic construct
  source 1..21: mol_type = other DNA; mol_type = other DNA
tacttcacgggcatgaccgag

SEQ ID NO: 29118 - DNA, 21 bp, synthetic construct
  source 1..21: mol_type = other DNA; mol_type = other DNA
tatagtcgggtagggaccaac

SEQ ID NO: 29119 - DNA, 21 bp, synthetic construct
  source 1..21: mol_type = other DNA; mol_type = other DNA
gagcatgctacatctaactgg

SEQ ID NO: 29120 - DNA, 21 bp, synthetic construct
  source 1..21: mol_type = other DNA; mol_type = other DNA
agagaatctacacacggagtt

SEQ ID NO: 29121 - DNA, 21 bp, synthetic construct
  source 1..21: mol_type = other DNA; mol_type = other DNA
tactccaggataggagggaat

SEQ ID NO: 29122 - DNA, 21 bp, synthetic construct
  source 1..21: mol_type = other DNA; mol_type = other DNA
cgatcgagtgacgcctacccc

SEQ ID NO: 29123 - DNA, 21 bp, synthetic construct
  source 1..21: mol_type = other DNA; mol_type = other DNA
aatgggaacgcatgccgccct

SEQ ID NO: 29124 - DNA, 21 bp, synthetic construct
  source 1..21: mol_type = other DNA; mol_type = other DNA
tgtacgtacaaaacaggccat

SEQ ID NO: 29125 - DNA, 21 bp, synthetic construct
  source 1..21: mol_type = other DNA; mol_type = other DNA
tgtacttcaaaaaccgatcat

SEQ ID NO: 29126 - DNA, 21 bp, synthetic construct
  source 1..21: mol_type = other DNA; mol_type = other DNA
tattctcgggcccaacttgac

SEQ ID NO: 29127 - DNA, 21 bp, synthetic construct
  source 1..21: mol_type = other DNA; mol_type = other DNA
tactactcaggcatcacggcc

SEQ ID NO: 29128 - DNA, 21 bp, synthetic construct
  source 1..21: mol_type = other DNA; mol_type = other DNA
gtgaataaggtatgtgctgat

SEQ ID NO: 29129 - DNA, 21 bp, synthetic construct
  source 1..21: mol_type = other DNA; mol_type = other DNA
attattagcacaaatggtata

SEQ ID NO: 29130 - DNA, 21 bp, synthetic construct
  source 1..21: mol_type = other DNA; mol_type = other DNA
ttgcataggctccatactagc

SEQ ID NO: 29131 - DNA, 21 bp, synthetic construct
  source 1..21: mol_type = other DNA; mol_type = other DNA
aggccagataccgtcaggtgg

SEQ ID NO: 29132 - DNA, 21 bp, synthetic construct
  source 1..21: mol_type = other DNA; mol_type = other DNA
tactacacgggtaagttggat

SEQ ID NO: 29133 - DNA, 21 bp, synthetic construct
  source 1..21: mol_type = other DNA; mol_type = other DNA
cgtacgtatgatagttatgcg

SEQ ID NO: 29134 - DNA, 21 bp, synthetic construct
  source 1..21: mol_type = other DNA; mol_type = other DNA
tactcacggattggtgaaggt

SEQ ID NO: 29135 - DNA, 21 bp, synthetic construct
  source 1..21: mol_type = other DNA; mol_type = other DNA
tgcaaggcacttagtcaggac

SEQ ID NO: 29136 - DNA, 21 bp, synthetic construct
  source 1..21: mol_type = other DNA; mol_type = other DNA
tatggaaaagtcggcatgtgc

SEQ ID NO: 29137 - DNA, 21 bp, synthetic construct
  source 1..21: mol_type = other DNA; mol_type = other DNA
tacagccgcgctaacgaaaac

SEQ ID NO: 29138 - DNA, 21 bp, synthetic construct
  source 1..21: mol_type = other DNA; mol_type = other DNA
tattggcatggggtgaaggat

SEQ ID NO: 29139 - DNA, 21 bp, synthetic construct
  source 1..21: mol_type = other DNA; mol_type = other DNA
tatagtcgagttggtttcaat

SEQ ID NO: 29140 - DNA, 21 bp, synthetic construct
  source 1..21: mol_type = other DNA; mol_type = other DNA
gcgtggagtactaatggggtg

SEQ ID NO: 29141 - DNA, 21 bp, synthetic construct
  source 1..21: mol_type = other DNA; mol_type = other DNA
tatcatgctcgatccccgctt

SEQ ID NO: 29142 - DNA, 21 bp, synthetic construct
  source 1..21: mol_type = other DNA; mol_type = other DNA
tactcacgcctccaggcaatc

SEQ ID NO: 29143 - DNA, 21 bp, synthetic construct
  source 1..21: mol_type = other DNA; mol_type = other DNA
tattttactggttatgttgag

SEQ ID NO: 29144 - DNA, 21 bp, synthetic construct
  source 1..21: mol_type = other DNA; mol_type = other DNA
tatagtagaaacgggccaaat

SEQ ID NO: 29145 - DNA, 21 bp, synthetic construct
  source 1..21: mol_type = other DNA; mol_type = other DNA
tatttttcaggtttacatgct

SEQ ID NO: 29146 - DNA, 21 bp, synthetic construct
  source 1..21: mol_type = other DNA; mol_type = other DNA
cagaatgagtatgtgatttac

SEQ ID NO: 29147 - DNA, 21 bp, synthetic construct
  source 1..21: mol_type = other DNA; mol_type = other DNA
tgtaaggggttgccgccgcca

SEQ ID NO: 29148 - DNA, 21 bp, synthetic construct
  source 1..21: mol_type = other DNA; mol_type = other DNA
tgtgacggctccgttaaggca

SEQ ID NO: 29149 - DNA, 21 bp, synthetic construct
  source 1..21: mol_type = other DNA; mol_type = other DNA
ggagctggcggggtctgtcca

SEQ ID NO: 29150 - DNA, 21 bp, synthetic construct
  source 1..21: mol_type = other DNA; mol_type = other DNA
tacttcactggtatgcaggat

SEQ ID NO: 29151 - DNA, 21 bp, synthetic construct
  source 1..21: mol_type = other DNA; mol_type = other DNA
tactcgaaatggaataacaac

SEQ ID NO: 29152 - DNA, 21 bp, synthetic construct
  source 1..21: mol_type = other DNA; mol_type = other DNA
tactatactggtaaattagag

SEQ ID NO: 29153 - DNA, 21 bp, synthetic construct
  source 1..21: mol_type = other DNA; mol_type = other DNA
tgtaggtctggagacgctgcg

SEQ ID NO: 29154 - DNA, 21 bp, synthetic construct
  source 1..21: mol_type = other DNA; mol_type = other DNA
acgtgggatgggctaattcca

SEQ ID NO: 29155 - DNA, 21 bp, synthetic construct
  source 1..21: mol_type = other DNA; mol_type = other DNA
ttcttttccggcgtcaaggat

SEQ ID NO: 29156 - DNA, 21 bp, synthetic construct
  source 1..21: mol_type = other DNA; mol_type = other DNA
tgtctggaacgctcgacactt

SEQ ID NO: 29157 - DNA, 21 bp, synthetic construct
  source 1..21: mol_type = other DNA; mol_type = other DNA
ttccaccggctttccccgggt

SEQ ID NO: 29158 - DNA, 21 bp, synthetic construct
  source 1..21: mol_type = other DNA; mol_type = other DNA
cgcaatgattttgtatcctgg

SEQ ID NO: 29159 - DNA, 21 bp, synthetic construct
  source 1..21: mol_type = other DNA; mol_type = other DNA
tggtggagtggtactagggaa

SEQ ID NO: 29160 - DNA, 21 bp, synthetic construct
  source 1..21: mol_type = other DNA; mol_type = other DNA
atgtgggacggcacaaacgct

SEQ ID NO: 29161 - DNA, 21 bp, synthetic construct
  source 1..21: mol_type = other DNA; mol_type = other DNA
tattggaccggcaccatagat

SEQ ID NO: 29162 - DNA, 21 bp, synthetic construct
  source 1..21: mol_type = other DNA; mol_type = other DNA
ttagcgaaatcgggtttaaat

SEQ ID NO: 29163 - DNA, 21 bp, synthetic construct
  source 1..21: mol_type = other DNA; mol_type = other DNA
tgctttaagcctatgaccgca

SEQ ID NO: 29164 - DNA, 21 bp, synthetic construct
  source 1..21: mol_type = other DNA; mol_type = other DNA
tggactaacatgtgcaaagcg

SEQ ID NO: 29165 - DNA, 21 bp, synthetic construct
  source 1..21: mol_type = other DNA; mol_type = other DNA
atcacgtcgagtaatggggtt

SEQ ID NO: 29166 - DNA, 21 bp, synthetic construct
  source 1..21: mol_type = other DNA; mol_type = other DNA
tattttacagggatgacggaa

SEQ ID NO: 29167 - DNA, 21 bp, synthetic construct
  source 1..21: mol_type = other DNA; mol_type = other DNA
tgcaaagggcgagatatagat

SEQ ID NO: 29168 - DNA, 21 bp, synthetic construct
  source 1..21: mol_type = other DNA; mol_type = other DNA
tattctaaacgcggggacaac

SEQ ID NO: 29169 - DNA, 21 bp, synthetic construct
  source 1..21: mol_type = other DNA; mol_type = other DNA
ttttctaaaatgaactataat

SEQ ID NO: 29170 - DNA, 21 bp, synthetic construct
  source 1..21: mol_type = other DNA; mol_type = other DNA
ttagcccgcacggggtgggat

SEQ ID NO: 29171 - DNA, 21 bp, synthetic construct
  source 1..21: mol_type = other DNA; mol_type = other DNA
ggttccggagagagtagatgg

SEQ ID NO: 29172 - DNA, 21 bp, synthetic construct
  source 1..21: mol_type = other DNA; mol_type = other DNA
cgctcttcagatgcgtatcca

SEQ ID NO: 29173 - DNA, 21 bp, synthetic construct
  source 1..21: mol_type = other DNA; mol_type = other DNA
tattcgagattgtcttacgac

SEQ ID NO: 29174 - DNA, 21 bp, synthetic construct
  source 1..21: mol_type = other DNA; mol_type = other DNA
tacttttcagggacgagagcc

SEQ ID NO: 29175 - DNA, 21 bp, synthetic construct
  source 1..21: mol_type = other DNA; mol_type = other DNA
tattatactggccaggtaagc

SEQ ID NO: 29176 - DNA, 21 bp, synthetic construct
  source 1..21: mol_type = other DNA; mol_type = other DNA
cggaccttcgatagttatgct

SEQ ID NO: 29177 - DNA, 21 bp, synthetic construct
  source 1..21: mol_type = other DNA; mol_type = other DNA
tattggaccggtaagcccgac

SEQ ID NO: 29178 - DNA, 21 bp, synthetic construct
  source 1..21: mol_type = other DNA; mol_type = other DNA
tacttcagtgggagaaccgac

SEQ ID NO: 29179 - DNA, 21 bp, synthetic construct
  source 1..21: mol_type = other DNA; mol_type = other DNA
tatagccgtctgggggagaat

SEQ ID NO: 29180 - DNA, 21 bp, synthetic construct
  source 1..21: mol_type = other DNA; mol_type = other DNA
ctgaacgattacgttacatat

SEQ ID NO: 29181 - DNA, 21 bp, synthetic construct
  source 1..21: mol_type = other DNA; mol_type = other DNA
aatgatgggcgcagcctctgg

SEQ ID NO: 29182 - DNA, 21 bp, synthetic construct
  source 1..21: mol_type = other DNA; mol_type = other DNA
tattcgaaactaagcgatcta

SEQ ID NO: 29183 - DNA, 21 bp, synthetic construct
  source 1..21: mol_type = other DNA; mol_type = other DNA
aaatccgaattcaagattttt

SEQ ID NO: 29184 - DNA, 21 bp, synthetic construct
  source 1..21: mol_type = other DNA; mol_type = other DNA
tatttctcggggaagacgtta

SEQ ID NO: 29185 - DNA, 21 bp, synthetic construct
  source 1..21: mol_type = other DNA; mol_type = other DNA
cgcgatgattacacgagctgg

SEQ ID NO: 29186 - DNA, 21 bp, synthetic construct
  source 1..21: mol_type = other DNA; mol_type = other DNA
tatagcagggcgggcacaaat

SEQ ID NO: 29187 - DNA, 21 bp, synthetic construct
  source 1..21: mol_type = other DNA; mol_type = other DNA
tactcacgcattgggcctacc

SEQ ID NO: 29188 - DNA, 21 bp, synthetic construct
  source 1..21: mol_type = other DNA; mol_type = other DNA
cgcggggagtcgcacagttgg

SEQ ID NO: 29189 - DNA, 21 bp, synthetic construct
  source 1..21: mol_type = other DNA; mol_type = other DNA
tacagtaaaaacaattacaac

SEQ ID NO: 29190 - DNA, 21 bp, synthetic construct
  source 1..21: mol_type = other DNA; mol_type = other DNA
tactccagagcaggagagaac

SEQ ID NO: 29191 - DNA, 21 bp, synthetic construct
  source 1..21: mol_type = other DNA; mol_type = other DNA
ttttttagtggtcaggtcgaa

SEQ ID NO: 29192 - DNA, 21 bp, synthetic construct
  source 1..21: mol_type = other DNA; mol_type = other DNA
ctcgctaaaatgggcccgaac

SEQ ID NO: 29193 - DNA, 21 bp, synthetic construct
  source 1..21: mol_type = other DNA; mol_type = other DNA
tactcaaagaatgggtgtaac

SEQ ID NO: 29194 - DNA, 21 bp, synthetic construct
  source 1..21: mol_type = other DNA; mol_type = other DNA
ctgagtagagcaaatttcaac

SEQ ID NO: 29195 - DNA, 21 bp, synthetic construct
  source 1..21: mol_type = other DNA; mol_type = other DNA
catagtagtacgaatggagcg

SEQ ID NO: 29196 - DNA, 21 bp, synthetic construct
  source 1..21: mol_type = other DNA; mol_type = other DNA
tattggaccggcacaattgaa

SEQ ID NO: 29197 - DNA, 21 bp, synthetic construct
  source 1..21: mol_type = other DNA; mol_type = other DNA
ttctcgaggcttaacatgaat

SEQ ID NO: 29198 - DNA, 21 bp, synthetic construct
  source 1..21: mol_type = other DNA; mol_type = other DNA
tactggtcggctgtgcaagag

SEQ ID NO: 29199 - DNA, 21 bp, synthetic construct
  source 1..21: mol_type = other DNA; mol_type = other DNA
cgagacgagtttcggagctgg

SEQ ID NO: 29200 - DNA, 21 bp, synthetic construct
  source 1..21: mol_type = other DNA; mol_type = other DNA
tactggcacggtgtcaaagac

SEQ ID NO: 29201 - DNA, 21 bp, synthetic construct
  source 1..21: mol_type = other DNA; mol_type = other DNA
tattgggaaggcgtcaaggag

SEQ ID NO: 29202 - DNA, 21 bp, synthetic construct
  source 1..21: mol_type = other DNA; mol_type = other DNA
tacgaagaaggatgcaaagaa

SEQ ID NO: 29203 - DNA, 21 bp, synthetic construct
  source 1..21: mol_type = other DNA; mol_type = other DNA
tctatggagtcacaccaatgg

SEQ ID NO: 29204 - DNA, 21 bp, synthetic construct
  source 1..21: mol_type = other DNA; mol_type = other DNA
tatttcaccggggtcactgat

SEQ ID NO: 29205 - DNA, 21 bp, synthetic construct
  source 1..21: mol_type = other DNA; mol_type = other DNA
agaggcggtgacgtcttccct

SEQ ID NO: 29206 - DNA, 21 bp, synthetic construct
  source 1..21: mol_type = other DNA; mol_type = other DNA
tatagtaggttgggtatgggg

SEQ ID NO: 29207 - DNA, 21 bp, synthetic construct
  source 1..21: mol_type = other DNA; mol_type = other DNA
tattcccgtgtaggcatgaat

SEQ ID NO: 29208 - DNA, 21 bp, synthetic construct
  source 1..21: mol_type = other DNA; mol_type = other DNA
tatgttaagtcgcagccccag

SEQ ID NO: 29209 - DNA, 21 bp, synthetic construct
  source 1..21: mol_type = other DNA; mol_type = other DNA
tacttccaaggacgaattgac

SEQ ID NO: 29210 - DNA, 21 bp, synthetic construct
  source 1..21: mol_type = other DNA; mol_type = other DNA
ctgcacaagttacaagtatac

SEQ ID NO: 29211 - DNA, 21 bp, synthetic construct
  source 1..21: mol_type = other DNA; mol_type = other DNA
tattgggccggggtgcgcgac

SEQ ID NO: 29212 - DNA, 21 bp, synthetic construct
  source 1..21: mol_type = other DNA; mol_type = other DNA
ctcagtcgaatgaactttaat

SEQ ID NO: 29213 - DNA, 21 bp, synthetic construct
  source 1..21: mol_type = other DNA; mol_type = other DNA
tatgagtcgactaatggaata

SEQ ID NO: 29214 - DNA, 21 bp, synthetic construct
  source 1..21: mol_type = other DNA; mol_type = other DNA
cgtctggagtcggtgaactgg

SEQ ID NO: 29215 - DNA, 21 bp, synthetic construct
  source 1..21: mol_type = other DNA; mol_type = other DNA
tactggaccggtaagatggaa

SEQ ID NO: 29216 - DNA, 21 bp, synthetic construct
  source 1..21: mol_type = other DNA; mol_type = other DNA
tacgccagattgggaatgaat

SEQ ID NO: 29217 - DNA, 21 bp, synthetic construct
  source 1..21: mol_type = other DNA; mol_type = other DNA
agagatgattttaccggttgg

SEQ ID NO: 29218 - DNA, 21 bp, synthetic construct
  source 1..21: mol_type = other DNA; mol_type = other DNA
gattcattccgcggttatgac

SEQ ID NO: 29219 - DNA, 21 bp, synthetic construct
  source 1..21: mol_type = other DNA; mol_type = other DNA
atcgtttcaacaaacggcatc

SEQ ID NO: 29220 - DNA, 21 bp, synthetic construct
  source 1..21: mol_type = other DNA; mol_type = other DNA
tatcatagattatcgattaat

SEQ ID NO: 29221 - DNA, 21 bp, synthetic construct
  source 1..21: mol_type = other DNA; mol_type = other DNA
tggtggtctggtcaaaaggat

SEQ ID NO: 29222 - DNA, 21 bp, synthetic construct
  source 1..21: mol_type = other DNA; mol_type = other DNA
tacagccgcgcaggtatcaat

SEQ ID NO: 29223 - DNA, 21 bp, synthetic construct
  source 1..21: mol_type = other DNA; mol_type = other DNA
cgtgatggctcgtcgacatgg

SEQ ID NO: 29224 - DNA, 21 bp, synthetic construct
  source 1..21: mol_type = other DNA; mol_type = other DNA
tactggacaggcacccatgag

SEQ ID NO: 29225 - DNA, 21 bp, synthetic construct
  source 1..21: mol_type = other DNA; mol_type = other DNA
ccgtatgcgagatccccgctt

SEQ ID NO: 29226 - DNA, 21 bp, synthetic construct
  source 1..21: mol_type = other DNA; mol_type = other DNA
tacgctaggggaggcatgaac

SEQ ID NO: 29227 - DNA, 21 bp, synthetic construct
  source 1..21: mol_type = other DNA; mol_type = other DNA
cttcaccgtcagctccctctt

SEQ ID NO: 29228 - DNA, 21 bp, synthetic construct
  source 1..21: mol_type = other DNA; mol_type = other DNA
tactttactggacggacgagc

SEQ ID NO: 29229 - DNA, 21 bp, synthetic construct
  source 1..21: mol_type = other DNA; mol_type = other DNA
tggcctttcggggttgatgca

SEQ ID NO: 29230 - DNA, 21 bp, synthetic construct
  source 1..21: mol_type = other DNA; mol_type = other DNA
acgtattctacgaatggtgta

SEQ ID NO: 29231 - DNA, 21 bp, synthetic construct
  source 1..21: mol_type = other DNA; mol_type = other DNA
tactttcatggcaggagcgag

SEQ ID NO: 29232 - DNA, 21 bp, synthetic construct
  source 1..21: mol_type = other DNA; mol_type = other DNA
tgtggtggggaccgcaagtcg

SEQ ID NO: 29233 - DNA, 21 bp, synthetic construct
  source 1..21: mol_type = other DNA; mol_type = other DNA
tgtgcccccgattatcgtgaa

SEQ ID NO: 29234 - DNA, 21 bp, synthetic construct
  source 1..21: mol_type = other DNA; mol_type = other DNA
tacgctaagatgggctggaac

SEQ ID NO: 29235 - DNA, 21 bp, synthetic construct
  source 1..21: mol_type = other DNA; mol_type = other DNA
ataataagcacaaacggtcgg

SEQ ID NO: 29236 - DNA, 21 bp, synthetic construct
  source 1..21: mol_type = other DNA; mol_type = other DNA
taccacaggttaggtgatacc

SEQ ID NO: 29237 - DNA, 21 bp, synthetic construct
  source 1..21: mol_type = other DNA; mol_type = other DNA
tactcgaggctctccgacgtc

SEQ ID NO: 29238 - DNA, 21 bp, synthetic construct
  source 1..21: mol_type = other DNA
aaagatgacttcgtcgcatac

SEQ ID NO: 29239 - DNA, 21 bp, synthetic construct
  source 1..21: mol_type = other DNA
tattcacgtgttggagtgaac

SEQ ID NO: 29240 - DNA, 21 bp, synthetic construct
  source 1..21: mol_type = other DNA
gacgccctggaatggcgcgac

SEQ ID NO: 29241 - DNA, 21 bp, synthetic construct
  source 1..21: mol_type = other DNA; mol_type = other DNA
ctagccaagaccggtacaaac

SEQ ID NO: 29242 - DNA, 21 bp, synthetic construct
  source 1..21: mol_type = other DNA; mol_type = other DNA
gtgccggagagatcgtgcgtc

SEQ ID NO: 29243 - DNA, 21 bp, synthetic construct
  source 1..21: mol_type = other DNA; mol_type = other DNA
tgcaaagaggtaaaacgagat

SEQ ID NO: 29244 - DNA, 21 bp, synthetic construct
  source 1..21: mol_type = other DNA; mol_type = other DNA
tatagtaggatacagcagaac

SEQ ID NO: 29245 - DNA, 21 bp, synthetic construct
  source 1..21: mol_type = other DNA; mol_type = other DNA
tattctaagagcaatgtcaac

SEQ ID NO: 29246 - DNA, 21 bp, synthetic construct
  source 1..21: mol_type = other DNA; mol_type = other DNA
cctatggaggctcgcagttgg

SEQ ID NO: 29247 - DNA, 21 bp, synthetic construct
  source 1..21: mol_type = other DNA; mol_type = other DNA
attcaactggactgcaaaggc

SEQ ID NO: 29248 - DNA, 21 bp, synthetic construct
  source 1..21: mol_type = other DNA; mol_type = other DNA
tatttcagcggcacccgtgcg

SEQ ID NO: 29249 - DNA, 21 bp, synthetic construct
  source 1..21: mol_type = other DNA; mol_type = other DNA
tatagtcgtctatcggggaat

SEQ ID NO: 29250 - DNA, 21 bp, synthetic construct
  source 1..21: mol_type = other DNA; mol_type = other DNA
tattttactcataaactcgac

SEQ ID NO: 29251 - DNA, 21 bp, synthetic construct
  source 1..21: mol_type = other DNA; mol_type = other DNA
aggggagagttcgtaatgttt

SEQ ID NO: 29252 - DNA, 21 bp, synthetic construct
  source 1..21: mol_type = other DNA; mol_type = other DNA
tattgggccggtaaggtagac

SEQ ID NO: 29253 - DNA, 21 bp, synthetic construct
  source 1..21: mol_type = other DNA; mol_type = other DNA
tatagcaaacaggggattaac

SEQ ID NO: 29254 - DNA, 21 bp, synthetic construct
  source 1..21: mol_type = other DNA; mol_type = other DNA
tatgctaggaatggagaaaac

SEQ ID NO: 29255 - DNA, 21 bp, synthetic construct
  source 1..21: mol_type = other DNA; mol_type = other DNA
cgagaggaatcactatactgg

SEQ ID NO: 29256 - DNA, 21 bp, synthetic construct
  source 1..21: mol_type = other DNA; mol_type = other DNA
tacttctcgggcgttcaagta

SEQ ID NO: 29257 - DNA, 21 bp, synthetic construct
  source 1..21: mol_type = other DNA; mol_type = other DNA
tacttcacaggcgtatgcccg

SEQ ID NO: 29258 - DNA, 21 bp, synthetic construct
  source 1..21: mol_type = other DNA; mol_type = other DNA
ggaggtgagtacgtaaggtgg

SEQ ID NO: 29259 - DNA, 21 bp, synthetic construct
  source 1..21: mol_type = other DNA; mol_type = other DNA
tacttcagcggcacgaatgct

SEQ ID NO: 29260 - DNA, 21 bp, synthetic construct
  source 1..21: mol_type = other DNA; mol_type = other DNA
tatttttcaggagtgatgcac

SEQ ID NO: 29261 - DNA, 21 bp, synthetic construct
  source 1..21: mol_type = other DNA; mol_type = other DNA
aattccccctacagacctttt

SEQ ID NO: 29262 - DNA, 21 bp, synthetic construct
  source 1..21: mol_type = other DNA; mol_type = other DNA
tacagtaaacaaaacatgaac

SEQ ID NO: 29263 - DNA, 21 bp, synthetic construct
  source 1..21: mol_type = other DNA; mol_type = other DNA
tacagcaggagtgggccaaat

SEQ ID NO: 29264 - DNA, 21 bp, synthetic construct
  source 1..21: mol_type = other DNA; mol_type = other DNA
tatgtacgcagcgatccgagg

SEQ ID NO: 29265 - DNA, 21 bp, synthetic construct
  source 1..21: mol_type = other DNA; mol_type = other DNA
atggaaccgggttgcaaggaa

SEQ ID NO: 29266 - DNA, 21 bp, synthetic construct
  source 1..21: mol_type = other DNA; mol_type = other DNA
aagatggaggcaatgacatgg

SEQ ID NO: 29267 - DNA, 21 bp, synthetic construct
  source 1..21: mol_type = other DNA; mol_type = other DNA
tgctataaaaaattgccggat

SEQ ID NO: 29268 - DNA, 21 bp, synthetic construct
  source 1..21: mol_type = other DNA; mol_type = other DNA
tatgattccacgaacgggagg

SEQ ID NO: 29269 - DNA, 21 bp, synthetic construct
  source 1..21: mol_type = other DNA; mol_type = other DNA
tactcaagattaaattataat

SEQ ID NO: 29270 - DNA, 21 bp, synthetic construct
  source 1..21: mol_type = other DNA; mol_type = other DNA
tgcaaaccacaggcaggcgga

SEQ ID NO: 29271 - DNA, 21 bp, synthetic construct
  source 1..21: mol_type = other DNA; mol_type = other DNA
gtattgcaatcggcaacatgg

SEQ ID NO: 29272 - DNA, 21 bp, synthetic construct
  source 1..21: mol_type = other DNA; mol_type = other DNA
tacttcgcagggattcaagcc

SEQ ID NO: 29273 - DNA, 21 bp, synthetic construct
  source 1..21: mol_type = other DNA; mol_type = other DNA
tactttagcgggaggcctgat

SEQ ID NO: 29274 - DNA, 21 bp, synthetic construct
  source 1..21: mol_type = other DNA; mol_type = other DNA
tggtggtccgggacacaggcc

SEQ ID NO: 29275 - DNA, 21 bp, synthetic construct
  source 1..21: mol_type = other DNA; mol_type = other DNA
ttcgactctacaaatggcata

SEQ ID NO: 29276 - DNA, 21 bp, synthetic construct
  source 1..21: mol_type = other DNA; mol_type = other DNA
tacgagtcgaccaacggaatt

SEQ ID NO: 29277 - DNA, 21 bp, synthetic construct
  source 1..21: mol_type = other DNA; mol_type = other DNA
tatttcagtggaatgagggac

SEQ ID NO: 29278 - DNA, 21 bp, synthetic construct
  source 1..21: mol_type = other DNA; mol_type = other DNA
tacgtacgatatgatagcgga

SEQ ID NO: 29279 - DNA, 21 bp, synthetic construct
  source 1..21: mol_type = other DNA; mol_type = other DNA
cagttgtcagataggacttgg

SEQ ID NO: 29280 - DNA, 21 bp, synthetic construct
  source 1..21: mol_type = other DNA; mol_type = other DNA
gtcgtcggttgctcgcccgat

SEQ ID NO: 29281 - DNA, 21 bp, synthetic construct
  source 1..21: mol_type = other DNA; mol_type = other DNA
ggatgtccgttcaagccacaa

SEQ ID NO: 29282 - DNA, 21 bp, synthetic construct
  source 1..21: mol_type = other DNA; mol_type = other DNA
tatttcacaggaaaagaagat

SEQ ID NO: 29283 - DNA, 21 bp, synthetic construct
  source 1..21: mol_type = other DNA; mol_type = other DNA
agacaaagcacaaacggtgtg

SEQ ID NO: 29284 - DNA, 21 bp, synthetic construct
  source 1..21: mol_type = other DNA; mol_type = other DNA
aggtcggagtttatggtatac

SEQ ID NO: 29285 - DNA, 21 bp, synthetic construct
  source 1..21: mol_type = other DNA; mol_type = other DNA
tatagtaaattggattacaac

SEQ ID NO: 29286 - DNA, 21 bp, synthetic construct
  source 1..21: mol_type = other DNA; mol_type = other DNA
tacagccgtgctcagttagat

SEQ ID NO: 29287 - DNA, 21 bp, synthetic construct
  source 1..21: mol_type = other DNA; mol_type = other DNA
acgtggagcacaaatgggata

SEQ ID NO: 29288 - DNA, 21 bp, synthetic construct
  source 1..21: mol_type = other DNA; mol_type = other DNA
gccttatatgatcggggatgg

SEQ ID NO: 29289 - DNA, 21 bp, synthetic construct
  source 1..21: mol_type = other DNA; mol_type = other DNA
ttctggactggtgttaaagac

SEQ ID NO: 29290 - DNA, 21 bp, synthetic construct
  source 1..21: mol_type = other DNA; mol_type = other DNA
agagatgggcagtcagcctac

SEQ ID NO: 29291 - DNA, 21 bp, synthetic construct
  source 1..21: mol_type = other DNA; mol_type = other DNA
tatagtaagggcaattgtaat

SEQ ID NO: 29292 - DNA, 21 bp, synthetic construct
  source 1..21: mol_type = other DNA; mol_type = other DNA
ggaagtggggaatcacgttgg

SEQ ID NO: 29293 - DNA, 21 bp, synthetic construct
  source 1..21: mol_type = other DNA; mol_type = other DNA
tttgctcggacaggccacaat

SEQ ID NO: 29294 - DNA, 21 bp, synthetic construct
  source 1..21: mol_type = other DNA; mol_type = other DNA
cgggagagcactaacgggatt

SEQ ID NO: 29295 - DNA, 21 bp, synthetic construct
  source 1..21: mol_type = other DNA; mol_type = other DNA
gtcccggagcactgtaaagac

SEQ ID NO: 29296 - DNA, 21 bp, synthetic construct
  source 1..21: mol_type = other DNA; mol_type = other DNA
tatcacagactacagagtgta

SEQ ID NO: 29297 - DNA, 21 bp, synthetic construct
  source 1..21: mol_type = other DNA; mol_type = other DNA
tactttaccggcaaggaggac

SEQ ID NO: 29298 - DNA, 21 bp, synthetic construct
  source 1..21: mol_type = other DNA; mol_type = other DNA
cccttgagctccggtgtttgg

SEQ ID NO: 29299 - DNA, 21 bp, synthetic construct
  source 1..21: mol_type = other DNA; mol_type = other DNA
tattcaaggatacaattggat

SEQ ID NO: 29300 - DNA, 21 bp, synthetic construct
  source 1..21: mol_type = other DNA; mol_type = other DNA
tattgcaaaggtcctgagttg

SEQ ID NO: 29301 - DNA, 21 bp, synthetic construct
  source 1..21: mol_type = other DNA; mol_type = other DNA
tactcaaaagtaggtaaaaat

SEQ ID NO: 29302 - DNA, 21 bp, synthetic construct
  source 1..21: mol_type = other DNA; mol_type = other DNA
atgtttgatgggaccgttgcc

SEQ ID NO: 29303 - DNA, 21 bp, synthetic construct
  source 1..21: mol_type = other DNA; mol_type = other DNA
tattcaagagtgggcaataac

SEQ ID NO: 29304 - DNA, 21 bp, synthetic construct
  source 1..21: mol_type = other DNA; mol_type = other DNA
tacgtgaaatcccagccacag

SEQ ID NO: 29305 - DNA, 21 bp, synthetic construct
  source 1..21: mol_type = other DNA; mol_type = other DNA
tatgctcgtcaaaatttcaat

SEQ ID NO: 29306 - DNA, 21 bp, synthetic construct
  source 1..21: mol_type = other DNA; mol_type = other DNA
ttttcacgcacggggtacaac

SEQ ID NO: 29307 - DNA, 21 bp, synthetic construct
  source 1..21: mol_type = other DNA; mol_type = other DNA
tacctaaagtcacaatccaag

SEQ ID NO: 29308 - DNA, 21 bp, synthetic construct
  source 1..21: mol_type = other DNA; mol_type = other DNA
tatagtcgtacaggggagaat

SEQ ID NO: 29309 - DNA, 21 bp, synthetic construct
  source 1..21: mol_type = other DNA; mol_type = other DNA
tactgggcgggcaagttggaa

SEQ ID NO: 29310 - DNA, 21 bp, synthetic construct
  source 1..21: mol_type = other DNA; mol_type = other DNA
ggcgatgagtggatcccctac

SEQ ID NO: 29311 - DNA, 21 bp, synthetic construct
  source 1..21: mol_type = other DNA; mol_type = other DNA
tgtacactaaagaccggacac

SEQ ID NO: 29312 - DNA, 21 bp, synthetic construct
  source 1..21: mol_type = other DNA; mol_type = other DNA
tacgccagacaaggtgtgaac

SEQ ID NO: 29313 - DNA, 21 bp, synthetic construct
  source 1..21: mol_type = other DNA; mol_type = other DNA
agggaaggatatagtcattgg

SEQ ID NO: 29314 - DNA, 21 bp, synthetic construct
  source 1..21: mol_type = other DNA; mol_type = other DNA
ctctcaagaatgaatgacaat

SEQ ID NO: 29315 - DNA, 21 bp, synthetic construct
  source 1..21: mol_type = other DNA; mol_type = other DNA
cgcgatggaacgtctacatgg

SEQ ID NO: 29316 - DNA, 21 bp, synthetic construct
  source 1..21: mol_type = other DNA; mol_type = other DNA
ctctggaccggcgaaaatgcg

SEQ ID NO: 29317 - DNA, 21 bp, synthetic construct
  source 1..21: mol_type = other DNA; mol_type = other DNA
tgcaaggacgaataccgggtt

SEQ ID NO: 29318 - DNA, 21 bp, synthetic construct
  source 1..21: mol_type = other DNA; mol_type = other DNA
aagctatgtcccaatttaatt

SEQ ID NO: 29319 - DNA, 21 bp, synthetic construct
  source 1..21: mol_type = other DNA; mol_type = other DNA
tgcactaataacgggaatcgc

SEQ ID NO: 29320 - DNA, 21 bp, synthetic construct
  source 1..21: mol_type = other DNA; mol_type = other DNA
ttgcatcgccttaacccagac

SEQ ID NO: 29321 - DNA, 21 bp, synthetic construct
  source 1..21: mol_type = other DNA; mol_type = other DNA
tactcacgcattcaacaaaat

SEQ ID NO: 29322 - DNA, 21 bp, synthetic construct
  source 1..21: mol_type = other DNA; mol_type = other DNA
tattcagccaatggtcctaac

SEQ ID NO: 29323 - DNA, 21 bp, synthetic construct
  source 1..21: mol_type = other DNA; mol_type = other DNA
tatgctaggtcaggtttcaat

SEQ ID NO: 29324 - DNA, 21 bp, synthetic construct
  source 1..21: mol_type = other DNA; mol_type = other DNA
acgcgacagggtgaccccgca

SEQ ID NO: 29325 - DNA, 21 bp, synthetic construct
  source 1..21: mol_type = other DNA; mol_type = other DNA
tacttcacgggggttccgagc

SEQ ID NO: 29326 - DNA, 21 bp, synthetic construct
  source 1..21: mol_type = other DNA; mol_type = other DNA
tgcaagccgcaggtggtaggt

SEQ ID NO: 29327 - DNA, 21 bp, synthetic construct
  source 1..21: mol_type = other DNA; mol_type = other DNA
ctgagtagattatcacctgtg

SEQ ID NO: 29328 - DNA, 21 bp, synthetic construct
  source 1..21: mol_type = other DNA; mol_type = other DNA
tttttcagtgggatacatgcc

SEQ ID NO: 29329 - DNA, 21 bp, synthetic construct
  source 1..21: mol_type = other DNA; mol_type = other DNA
tattttgcaggaataattagc

SEQ ID NO: 29330 - DNA, 21 bp, synthetic construct
  source 1..21: mol_type = other DNA; mol_type = other DNA
agagcattcgacgcctacgag

SEQ ID NO: 29331 - DNA, 21 bp, synthetic construct
  source 1..21: mol_type = other DNA; mol_type = other DNA
cgaggggagtatatgtacccg

SEQ ID NO: 29332 - DNA, 21 bp, synthetic construct
  source 1..21: mol_type = other DNA; mol_type = other DNA
ttctggtcagggatacactca

SEQ ID NO: 29333 - DNA, 21 bp, synthetic construct
  source 1..21: mol_type = other DNA; mol_type = other DNA
tatcacaaggccatgcagaat

SEQ ID NO: 29334 - DNA, 21 bp, synthetic construct
  source 1..21: mol_type = other DNA; mol_type = other DNA
tatagtagactctcaaccaac

SEQ ID NO: 29335 - DNA, 21 bp, synthetic construct
  source 1..21: mol_type = other DNA; mol_type = other DNA
cattcacggatgaatgaaaac

SEQ ID NO: 29336 - DNA, 21 bp, synthetic construct
  source 1..21: mol_type = other DNA; mol_type = other DNA
atgtgggatggtactaatgcg

SEQ ID NO: 29337 - DNA, 21 bp, synthetic construct
  source 1..21: mol_type = other DNA; mol_type = other DNA
tattttacaaagaattgcgaa

SEQ ID NO: 29338 - DNA, 21 bp, synthetic construct
  source 1..21: mol_type = other DNA; mol_type = other DNA
tgtaccccttacctacatgaa

SEQ ID NO: 29339 - DNA, 21 bp, synthetic construct
  source 1..21: mol_type = other DNA; mol_type = other DNA
tattcacgcgccggttttgat

SEQ ID NO: 29340 - DNA, 21 bp, synthetic construct
  source 1..21: mol_type = other DNA; mol_type = other DNA
tattgggcgggtatcccagat

SEQ ID NO: 29341 - DNA, 21 bp, synthetic construct
  source 1..21: mol_type = other DNA; mol_type = other DNA
tactcccggctgggctcgaac

SEQ ID NO: 29342 - DNA, 21 bp, synthetic construct
  source 1..21: mol_type = other DNA; mol_type = other DNA
accgagtcaagcaatggtgtg

SEQ ID NO: 29343 - DNA, 21 bp, synthetic construct
  source 1..21: mol_type = other DNA; mol_type = other DNA
ctctcgaagttaggcgtcaac

SEQ ID NO: 29344 - DNA, 21 bp, synthetic construct
  source 1..21: mol_type = other DNA; mol_type = other DNA
gatggagccatctatctccgt

SEQ ID NO: 29345 - DNA, 21 bp, synthetic construct
  source 1..21: mol_type = other DNA; mol_type = other DNA
tatcatcgattgggggatcat

SEQ ID NO: 29346 - DNA, 21 bp, synthetic construct
  source 1..21: mol_type = other DNA; mol_type = other DNA
tatgcaagactcggcaacaac

SEQ ID NO: 29347 - DNA, 21 bp, synthetic construct
  source 1..21: mol_type = other DNA; mol_type = other DNA
ttctcaaggattggcagtaat

SEQ ID NO: 29348 - DNA, 21 bp, synthetic construct
  source 1..21: mol_type = other DNA; mol_type = other DNA
tacgcacgaacagggcataac

SEQ ID NO: 29349 - DNA, 21 bp, synthetic construct
  source 1..21: mol_type = other DNA; mol_type = other DNA
agagatttcgatgtctaccca

SEQ ID NO: 29350 - DNA, 21 bp, synthetic construct
  source 1..21: mol_type = other DNA; mol_type = other DNA
tattatacggggaagcttgaa

SEQ ID NO: 29351 - DNA, 21 bp, synthetic construct
  source 1..21: mol_type = other DNA; mol_type = other DNA
tatttaattagtcaatcttac

SEQ ID NO: 29352 - DNA, 21 bp, synthetic construct
  source 1..21: mol_type = other DNA; mol_type = other DNA
tttgatagtactaacggtgta

SEQ ID NO: 29353 - DNA, 21 bp, synthetic construct
  source 1..21: mol_type = other DNA; mol_type = other DNA
tatagtcgcgtcaacgaaaac

SEQ ID NO: 29354 - DNA, 21 bp, synthetic construct
  source 1..21: mol_type = other DNA; mol_type = other DNA
acatggtctactaatggcgta

SEQ ID NO: 29355 - DNA, 21 bp, synthetic construct
  source 1..21: mol_type = other DNA; mol_type = other DNA
tacttctctaatatcaaggaa

SEQ ID NO: 29356 - DNA, 21 bp, synthetic construct
  source 1..21: mol_type = other DNA; mol_type = other DNA
tactactcgggcattcgtgat

SEQ ID NO: 29357 - DNA, 21 bp, synthetic construct
  source 1..21: mol_type = other DNA; mol_type = other DNA
tatgtaaagtcacagacaata

SEQ ID NO: 29358 - DNA, 21 bp, synthetic construct
  source 1..21: mol_type = other DNA; mol_type = other DNA
agcatggcaagtgtgaaatgg

SEQ ID NO: 29359 - DNA, 21 bp, synthetic construct
  source 1..21: mol_type = other DNA; mol_type = other DNA
cgtgacagtactcatggggtt

SEQ ID NO: 29360 - DNA, 21 bp, synthetic construct
  source 1..21: mol_type = other DNA; mol_type = other DNA
tacgcccgcaccggcaacaat

SEQ ID NO: 29361 - DNA, 21 bp, synthetic construct
  source 1..21: mol_type = other DNA; mol_type = other DNA
tatccaaattgtcccggggtt

SEQ ID NO: 29362 - DNA, 21 bp, synthetic construct
  source 1..21: mol_type = other DNA; mol_type = other DNA
attccgatcaagtgcccttct

SEQ ID NO: 29363 - DNA, 21 bp, synthetic construct
  source 1..21: mol_type = other DNA; mol_type = other DNA
tgcccaagaaacacccctccg

SEQ ID NO: 29364 - DNA, 21 bp, synthetic construct
  source 1..21: mol_type = other DNA; mol_type = other DNA
aatctaatggggtgtacaggc

SEQ ID NO: 29365 - DNA, 21 bp, synthetic construct
  source 1..21: mol_type = other DNA; mol_type = other DNA
tactcgagaactggcgaaaat

SEQ ID NO: 29366 - DNA, 21 bp, synthetic construct
  source 1..21: mol_type = other DNA; mol_type = other DNA
tactcccgtttgagcacgaat

SEQ ID NO: 29367 - DNA, 21 bp, synthetic construct
  source 1..21: mol_type = other DNA; mol_type = other DNA
acaatgagtacaaacggcata

SEQ ID NO: 29368 - DNA, 21 bp, synthetic construct
  source 1..21: mol_type = other DNA; mol_type = other DNA
tggcaccgtctctccgtaaat

SEQ ID NO: 29369 - DNA, 21 bp, synthetic construct
  source 1..21: mol_type = other DNA; mol_type = other DNA
tattttagcggcatggtggcc

SEQ ID NO: 29370 - DNA, 21 bp, synthetic construct
  source 1..21: mol_type = other DNA; mol_type = other DNA
tactggagcgggatacactcc

SEQ ID NO: 29371 - DNA, 21 bp, synthetic construct
  source 1..21: mol_type = other DNA; mol_type = other DNA
tattggtcgaaggtattagac

SEQ ID NO: 29372 - DNA, 21 bp, synthetic construct
  source 1..21: mol_type = other DNA; mol_type = other DNA
ttctttaccggctacgtcgat

SEQ ID NO: 29373 - DNA, 21 bp, synthetic construct
  source 1..21: mol_type = other DNA; mol_type = other DNA
ttgtctcgtgccagtcacgac

SEQ ID NO: 29374 - DNA, 21 bp, synthetic construct
  source 1..21: mol_type = other DNA; mol_type = other DNA
tattggacagggaaaatggag

SEQ ID NO: 29375 - DNA, 21 bp, synthetic construct
  source 1..21: mol_type = other DNA; mol_type = other DNA
cacactggcacatcttgccta

SEQ ID NO: 29376 - DNA, 21 bp, synthetic construct
  source 1..21: mol_type = other DNA; mol_type = other DNA
tacgccaagggtggctggaat

SEQ ID NO: 29377 - DNA, 21 bp, synthetic construct
  source 1..21: mol_type = other DNA; mol_type = other DNA
tactggagtggaactcatgag

SEQ ID NO: 29378 - DNA, 21 bp, synthetic construct
  source 1..21: mol_type = other DNA; mol_type = other DNA
ccgttatctgacaggacatgg

SEQ ID NO: 29379 - DNA, 21 bp, synthetic construct
  source 1..21: mol_type = other DNA; mol_type = other DNA
ggatcggagtttttaccttgg

SEQ ID NO: 29380 - DNA, 21 bp, synthetic construct
  source 1..21: mol_type = other DNA; mol_type = other DNA
tactttaccgggcgctctgac

SEQ ID NO: 29381 - DNA, 21 bp, synthetic construct
  source 1..21: mol_type = other DNA; mol_type = other DNA
tacgcaaaaggtggctgcaac

SEQ ID NO: 29382 - DNA, 21 bp, synthetic construct
  source 1..21: mol_type = other DNA; mol_type = other DNA
tattttagtggcgttgccatg

SEQ ID NO: 29383 - DNA, 21 bp, synthetic construct
  source 1..21: mol_type = other DNA; mol_type = other DNA
ttctggagcggcgtacgagaa

SEQ ID NO: 29384 - DNA, 21 bp, synthetic construct
  source 1..21: mol_type = other DNA; mol_type = other DNA
tatgcccgaactgggtcgaat

SEQ ID NO: 29385 - DNA, 21 bp, synthetic construct
  source 1..21: mol_type = other DNA; mol_type = other DNA
agggaaatgagcgtgtacccg

SEQ ID NO: 29386 - DNA, 21 bp, synthetic construct
  source 1..21: mol_type = other DNA; mol_type = other DNA
tactcacgactaggtgttaac

SEQ ID NO: 29387 - DNA, 21 bp, synthetic construct
  source 1..21: mol_type = other DNA; mol_type = other DNA
tattcaagaatacaaatggac

SEQ ID NO: 29388 - DNA, 21 bp, synthetic construct
  source 1..21: mol_type = other DNA; mol_type = other DNA
gtctccagtcaaaacggggtg

SEQ ID NO: 29389 - DNA, 21 bp, synthetic construct
  source 1..21: mol_type = other DNA; mol_type = other DNA
cgcgaccagtacgtatatccc

SEQ ID NO: 29390 - DNA, 21 bp, synthetic construct
  source 1..21: mol_type = other DNA; mol_type = other DNA
tacgcaaaggcgaattacaat

SEQ ID NO: 29391 - DNA, 21 bp, synthetic construct
  source 1..21: mol_type = other DNA; mol_type = other DNA
tactttagtgggactcaggac

SEQ ID NO: 29392 - DNA, 21 bp, synthetic construct
  source 1..21: mol_type = other DNA; mol_type = other DNA
cgcttagacagcagagaatgg

SEQ ID NO: 29393 - DNA, 21 bp, synthetic construct
  source 1..21: mol_type = other DNA; mol_type = other DNA
cgcgaggaaagcgtcttccct

SEQ ID NO: 29394 - DNA, 21 bp, synthetic construct
  source 1..21: mol_type = other DNA; mol_type = other DNA
tacgctaaaggcggtgcgaat

SEQ ID NO: 29395 - DNA, 21 bp, synthetic construct
  source 1..21: mol_type = other DNA; mol_type = other DNA
tatccatatggaacgaacgct

SEQ ID NO: 29396 - DNA, 21 bp, synthetic construct
  source 1..21: mol_type = other DNA; mol_type = other DNA
aaaagcgatttcacgagctac

SEQ ID NO: 29397 - DNA, 21 bp, synthetic construct
  source 1..21: mol_type = other DNA; mol_type = other DNA
ggcgtcgaggccgtaaggtgg

SEQ ID NO: 29398 - DNA, 21 bp, synthetic construct
  source 1..21: mol_type = other DNA; mol_type = other DNA
tatgcgcgtactaacttcaac

SEQ ID NO: 29399 - DNA, 21 bp, synthetic construct
  source 1..21: mol_type = other DNA; mol_type = other DNA
cacaacagttctaacggcgta

SEQ ID NO: 29400 - DNA, 21 bp, synthetic construct
  source 1..21: mol_type = other DNA; mol_type = other DNA
gtccattcctttaacggcgtt

SEQ ID NO: 29401 - DNA, 21 bp, synthetic construct
  source 1..21: mol_type = other DNA; mol_type = other DNA
gatatgagtagtacgaaatgg

SEQ ID NO: 29402 - DNA, 21 bp, synthetic construct
  source 1..21: mol_type = other DNA; mol_type = other DNA
tattcccggagcggggtcaat

SEQ ID NO: 29403 - DNA, 21 bp, synthetic construct
  source 1..21: mol_type = other DNA; mol_type = other DNA
tgcaaacctggatcgccgggc

SEQ ID NO: 29404 - DNA, 21 bp, synthetic construct
  source 1..21: mol_type = other DNA; mol_type = other DNA
tggtttacaggtaaggtagat

SEQ ID NO: 29405 - DNA, 21 bp, synthetic construct
  source 1..21: mol_type = other DNA; mol_type = other DNA
tattggacggggacgcacgaa

SEQ ID NO: 29406 - DNA, 21 bp, synthetic construct
  source 1..21: mol_type = other DNA; mol_type = other DNA
tacttttcaggggtgagaagc

SEQ ID NO: 29407 - DNA, 21 bp, synthetic construct
  source 1..21: mol_type = other DNA; mol_type = other DNA
gagacagattcggggtactgg

SEQ ID NO: 29408 - DNA, 21 bp, synthetic construct
  source 1..21: mol_type = other DNA; mol_type = other DNA
tattctaggctaggtagtaat

SEQ ID NO: 29409 - DNA, 21 bp, synthetic construct
  source 1..21: mol_type = other DNA; mol_type = other DNA
tatagtcgcgcaaatgtcaat

SEQ ID NO: 29410 - DNA, 21 bp, synthetic construct
  source 1..21: mol_type = other DNA; mol_type = other DNA
tgcaaaaggcaatcaccagaa

SEQ ID NO: 29411 - DNA, 21 bp, synthetic construct
  source 1..21: mol_type = other DNA; mol_type = other DNA
tactggagtggaaagatcgag

SEQ ID NO: 29412 - DNA, 21 bp, synthetic construct
  source 1..21: mol_type = other DNA; mol_type = other DNA
ggctcaccgggagtgtcttgg

SEQ ID NO: 29413 - DNA, 21 bp, synthetic construct
  source 1..21: mol_type = other DNA; mol_type = other DNA
tacagccgcacaggggcaaat

SEQ ID NO: 29414 - DNA, 21 bp, synthetic construct
  source 1..21: mol_type = other DNA; mol_type = other DNA
acggcgaactgcctaaagccc

SEQ ID NO: 29415 - DNA, 21 bp, synthetic construct
  source 1..21: mol_type = other DNA; mol_type = other DNA
gggtgttttagtgaaggaagg

SEQ ID NO: 29416 - DNA, 21 bp, synthetic construct
  source 1..21: mol_type = other DNA; mol_type = other DNA
tactcaaggatgggtattaat

SEQ ID NO: 29417 - DNA, 21 bp, synthetic construct
  source 1..21: mol_type = other DNA; mol_type = other DNA
ggctgtggtacgaagttgggg

SEQ ID NO: 29418 - DNA, 21 bp, synthetic construct
  source 1..21: mol_type = other DNA
tattggagtggaatgcaggaa

SEQ ID NO: 29419 - DNA, 21 bp, synthetic construct
  source 1..21: mol_type = other DNA; mol_type = other DNA
tgtaaacccggtgcggcatcg

SEQ ID NO: 29420 - DNA, 21 bp, synthetic construct
  source 1..21: mol_type = other DNA; mol_type = other DNA
gttgcaagaactggctgggat

SEQ ID NO: 29421 - DNA, 21 bp, synthetic construct
  source 1..21: mol_type = other DNA; mol_type = other DNA
aggggtgacttctcgagctgg

SEQ ID NO: 29422 - DNA, 21 bp, synthetic construct
  source 1..21: mol_type = other DNA; mol_type = other DNA
ggtgacggtttcagcacgtgg

SEQ ID NO: 29423 - DNA, 21 bp, synthetic construct
  source 1..21: mol_type = other DNA; mol_type = other DNA
tattcaagggcaggcataaac

SEQ ID NO: 29424 - DNA, 21 bp, synthetic construct
  source 1..21: mol_type = other DNA; mol_type = other DNA
tacgtgagaagcgatagggcc

SEQ ID NO: 29425 - DNA, 21 bp, synthetic construct
  source 1..21: mol_type = other DNA; mol_type = other DNA
tatagcaagattgggaaagac

SEQ ID NO: 29426 - DNA, 21 bp, synthetic construct
  source 1..21: mol_type = other DNA; mol_type = other DNA
tgtcgagacaacaagctcgag

SEQ ID NO: 29427 - DNA, 21 bp, synthetic construct
  source 1..21: mol_type = other DNA; mol_type = other DNA
tacgctcgaattggacataac

SEQ ID NO: 29428 - DNA, 21 bp, synthetic construct
  source 1..21: mol_type = other DNA; mol_type = other DNA
tacttcagtgggaaacaaagc

SEQ ID NO: 29429 - DNA, 21 bp, synthetic construct
  source 1..21: mol_type = other DNA; mol_type = other DNA
tacgccaaagccggatggaac

SEQ ID NO: 29430 - DNA, 21 bp, synthetic construct
  source 1..21: mol_type = other DNA; mol_type = other DNA
ctacatagcacgaatggagtg

SEQ ID NO: 29431 - DNA, 21 bp, synthetic construct
  source 1..21: mol_type = other DNA; mol_type = other DNA
tatagtaagagtaactggaat

SEQ ID NO: 29432 - DNA, 21 bp, synthetic construct
  source 1..21: mol_type = other DNA; mol_type = other DNA
tattacagtggtcgagttgag

SEQ ID NO: 29433 - DNA, 21 bp, synthetic construct
  source 1..21: mol_type = other DNA; mol_type = other DNA
taccataaatcccaaaatttt

SEQ ID NO: 29434 - DNA, 21 bp, synthetic construct
  source 1..21: mol_type = other DNA; mol_type = other DNA
gttttatccgaaaggtcgtgg

SEQ ID NO: 29435 - DNA, 21 bp, synthetic construct
  source 1..21: mol_type = other DNA; mol_type = other DNA
aaagatggttacagcttgtat

SEQ ID NO: 29436 - DNA, 21 bp, synthetic construct
  source 1..21: mol_type = other DNA; mol_type = other DNA
ttcgtgaagtcgcagccctgc

SEQ ID NO: 29437 - DNA, 21 bp, synthetic construct
  source 1..21: mol_type = other DNA; mol_type = other DNA
tactctagactgcaattcgat

SEQ ID NO: 29438 - DNA, 21 bp, synthetic construct
  source 1..21: mol_type = other DNA; mol_type = other DNA
ggcgaacctacttgccgaccg

SEQ ID NO: 29439 - DNA, 21 bp, synthetic construct
  source 1..21: mol_type = other DNA; mol_type = other DNA
agggacgagtatgtatatttc

SEQ ID NO: 29440 - DNA, 21 bp, synthetic construct
  source 1..21: mol_type = other DNA; mol_type = other DNA
ggctgccgaccgtgttcagag

SEQ ID NO: 29441 - DNA, 21 bp, synthetic construct
  source 1..21: mol_type = other DNA; mol_type = other DNA
aagtcggattttacaacctat

SEQ ID NO: 29442 - DNA, 21 bp, synthetic construct
  source 1..21: mol_type = other DNA; mol_type = other DNA
ctacatagactgcacaccagc

SEQ ID NO: 29443 - DNA, 21 bp, synthetic construct
  source 1..21: mol_type = other DNA; mol_type = other DNA
ccaatggagagcaaaaaatgg

SEQ ID NO: 29444 - DNA, 21 bp, synthetic construct
  source 1..21: mol_type = other DNA; mol_type = other DNA
tatttctcgggtgtcccgcac

SEQ ID NO: 29445 - DNA, 21 bp, synthetic construct
  source 1..21: mol_type = other DNA; mol_type = other DNA
ctcgccagaaaccttcccaac

SEQ ID NO: 29446 - DNA, 21 bp, synthetic construct
  source 1..21: mol_type = other DNA; mol_type = other DNA
tacgccaggaatggtataaat

SEQ ID NO: 29447 - DNA, 21 bp, synthetic construct
  source 1..21: mol_type = other DNA; mol_type = other DNA
taccataaaggcaacaacaac

SEQ ID NO: 29448 - DNA, 21 bp, synthetic construct
  source 1..21: mol_type = other DNA; mol_type = other DNA
cttcccagagcgggcgattgg

SEQ ID NO: 29449 - DNA, 21 bp, synthetic construct
  source 1..21: mol_type = other DNA; mol_type = other DNA
tactccaagtcaaattggaac

SEQ ID NO: 29450 - DNA, 21 bp, synthetic construct
  source 1..21: mol_type = other DNA; mol_type = other DNA
cggactaacaacgtttaccct

SEQ ID NO: 29451 - DNA, 21 bp, synthetic construct
  source 1..21: mol_type = other DNA; mol_type = other DNA
acatcggaattcaaggtatat

SEQ ID NO: 29452 - DNA, 21 bp, synthetic construct
  source 1..21: mol_type = other DNA; mol_type = other DNA
tatagtaagcacaaccacaat

SEQ ID NO: 29453 - DNA, 21 bp, synthetic construct
  source 1..21: mol_type = other DNA; mol_type = other DNA
tatttccaaggtcgtatcgac

SEQ ID NO: 29454 - DNA, 21 bp, synthetic construct
  source 1..21: mol_type = other DNA; mol_type = other DNA
tttttcgcgggaattatcgcc

SEQ ID NO: 29455 - DNA, 21 bp, synthetic construct
  source 1..21: mol_type = other DNA; mol_type = other DNA
tatgttcgtcatgatcccatg

SEQ ID NO: 29456 - DNA, 21 bp, synthetic construct
  source 1..21: mol_type = other DNA; mol_type = other DNA
tactactcaggagtgatagag

SEQ ID NO: 29457 - DNA, 21 bp, synthetic construct
  source 1..21: mol_type = other DNA; mol_type = other DNA
ttaagtcgagcttcccgcgac

SEQ ID NO: 29458 - DNA, 21 bp, synthetic construct
  source 1..21: mol_type = other DNA; mol_type = other DNA
ctacacagactcggcgaacat

SEQ ID NO: 29459 - DNA, 21 bp, synthetic construct
  source 1..21: mol_type = other DNA; mol_type = other DNA
tgtagaaatgggactactccc

SEQ ID NO: 29460 - DNA, 21 bp, synthetic construct
  source 1..21: mol_type = other DNA; mol_type = other DNA
ccggactcgacaaatggccgc

SEQ ID NO: 29461 - DNA, 21 bp, synthetic construct
  source 1..21: mol_type = other DNA; mol_type = other DNA
tacagtaggataggtgtcaat

SEQ ID NO: 29462 - DNA, 21 bp, synthetic construct
  source 1..21: mol_type = other DNA; mol_type = other DNA
ttcagcaggacgggttttaac

SEQ ID NO: 29463 - DNA, 21 bp, synthetic construct
  source 1..21: mol_type = other DNA; mol_type = other DNA
tttgtcaaaagtcaaccatgt

SEQ ID NO: 29464 - DNA, 21 bp, synthetic construct
  source 1..21: mol_type = other DNA; mol_type = other DNA
tgtctaaaatcgcagtcgtac

SEQ ID NO: 29465 - DNA, 21 bp, synthetic construct
  source 1..21: mol_type = other DNA; mol_type = other DNA
gttatggaggcgagagggtgg

SEQ ID NO: 29466 - DNA, 21 bp, synthetic construct
  source 1..21: mol_type = other DNA; mol_type = other DNA
aaatacgatcacgtagcctgg

SEQ ID NO: 29467 - DNA, 21 bp, synthetic construct
  source 1..21: mol_type = other DNA; mol_type = other DNA
tacgccaggactaatgtgaac

SEQ ID NO: 29468 - DNA, 21 bp, synthetic construct
  source 1..21: mol_type = other DNA; mol_type = other DNA
gactacaccggaaagagcgct

SEQ ID NO: 29469 - DNA, 21 bp, synthetic construct
  source 1..21: mol_type = other DNA; mol_type = other DNA
ttaggcggtacctcacgttac

SEQ ID NO: 29470 - DNA, 21 bp, synthetic construct
  source 1..21: mol_type = other DNA; mol_type = other DNA
tacagcaagaacggcttcaac

SEQ ID NO: 29471 - DNA, 21 bp, synthetic construct
  source 1..21: mol_type = other DNA; mol_type = other DNA
tttagcagagctggttataat

SEQ ID NO: 29472 - DNA, 21 bp, synthetic construct
  source 1..21: mol_type = other DNA; mol_type = other DNA
cgtgatgattatgtccattgg

SEQ ID NO: 29473 - DNA, 21 bp, synthetic construct
  source 1..21: mol_type = other DNA; mol_type = other DNA
tattcgcgcgccggtgctaac

SEQ ID NO: 29474 - DNA, 21 bp, synthetic construct
  source 1..21: mol_type = other DNA; mol_type = other DNA
tactttacaggccagcagagc

SEQ ID NO: 29475 - DNA, 21 bp, synthetic construct
  source 1..21: mol_type = other DNA; mol_type = other DNA
tatagtcgtatcggtccagtc

SEQ ID NO: 29476 - DNA, 21 bp, synthetic construct
  source 1..21: mol_type = other DNA; mol_type = other DNA
tattcaagggccggcatgaat

SEQ ID NO: 29477 - DNA, 21 bp, synthetic construct
  source 1..21: mol_type = other DNA; mol_type = other DNA
cccagggacgtatgtcccaag

SEQ ID NO: 29478 - DNA, 21 bp, synthetic construct
  source 1..21: mol_type = other DNA; mol_type = other DNA
tactttcatggtatcccggac

SEQ ID NO: 29479 - DNA, 21 bp, synthetic construct
  source 1..21: mol_type = other DNA; mol_type = other DNA
ttctcacgtctatccatcaat

SEQ ID NO: 29480 - DNA, 21 bp, synthetic construct
  source 1..21: mol_type = other DNA; mol_type = other DNA
tacttcacgaatgttcgtgag

SEQ ID NO: 29481 - DNA, 21 bp, synthetic construct
  source 1..21: mol_type = other DNA; mol_type = other DNA
ggagggggcagctcgcattgg

SEQ ID NO: 29482 - DNA, 21 bp, synthetic construct
  source 1..21: mol_type = other DNA; mol_type = other DNA
tactggagtggtaccgtgagt

SEQ ID NO: 29483 - DNA, 21 bp, synthetic construct
  source 1..21: mol_type = other DNA; mol_type = other DNA
tattggtccgggctcaaagaa

SEQ ID NO: 29484 - DNA, 21 bp, synthetic construct
  source 1..21: mol_type = other DNA; mol_type = other DNA
tgtaagccaatgaagcttgat

SEQ ID NO: 29485 - DNA, 21 bp, synthetic construct
  source 1..21: mol_type = other DNA; mol_type = other DNA
tattggtcaggcaaaattgaa

SEQ ID NO: 29486 - DNA, 21 bp, synthetic construct
  source 1..21: mol_type = other DNA; mol_type = other DNA
ttgtcccgcgcaaattttaat

SEQ ID NO: 29487 - DNA, 21 bp, synthetic construct
  source 1..21: mol_type = other DNA; mol_type = other DNA
tatgcaaggggtggaaacaat

SEQ ID NO: 29488 - DNA, 21 bp, synthetic construct
  source 1..21: mol_type = other DNA; mol_type = other DNA
ttctcgcgattgggacacaat

SEQ ID NO: 29489 - DNA, 21 bp, synthetic construct
  source 1..21: mol_type = other DNA; mol_type = other DNA
ccttatgctcggagtgtagat

SEQ ID NO: 29490 - DNA, 21 bp, synthetic construct
  source 1..21: mol_type = other DNA; mol_type = other DNA
ttctttactggcagacttgag

SEQ ID NO: 29491 - DNA, 21 bp, synthetic construct
  source 1..21: mol_type = other DNA; mol_type = other DNA
cgcgacgccacatcaagctgg

SEQ ID NO: 29492 - DNA, 21 bp, synthetic construct
  source 1..21: mol_type = other DNA; mol_type = other DNA
ccatatgcacgaagccttgat

SEQ ID NO: 29493 - DNA, 21 bp, synthetic construct
  source 1..21: mol_type = other DNA; mol_type = other DNA
tgtaagataccgtccgccgga

SEQ ID NO: 29494 - DNA, 21 bp, synthetic construct
  source 1..21: mol_type = other DNA; mol_type = other DNA
tactacagcggggtaaaaagc

SEQ ID NO: 29495 - DNA, 21 bp, synthetic construct
  source 1..21: mol_type = other DNA; mol_type = other DNA
tgtaagggattacccgtacct

SEQ ID NO: 29496 - DNA, 21 bp, synthetic construct
  source 1..21: mol_type = other DNA; mol_type = other DNA
tatttctctggtcgtcacgag

SEQ ID NO: 29497 - DNA, 21 bp, synthetic construct
  source 1..21: mol_type = other DNA; mol_type = other DNA
ctaagagacggcacaatggcg

SEQ ID NO: 29498 - DNA, 21 bp, synthetic construct
  source 1..21: mol_type = other DNA; mol_type = other DNA
ctacatcgaatgacgccaaat

SEQ ID NO: 29499 - DNA, 21 bp, synthetic construct
  source 1..21: mol_type = other DNA; mol_type = other DNA
cgtgacggctcctcatcctgg

SEQ ID NO: 29500 - DNA, 21 bp, synthetic construct
  source 1..21: mol_type = other DNA; mol_type = other DNA
ggtagtgggacgaaatgcgga

SEQ ID NO: 29501 - DNA, 21 bp, synthetic construct
  source 1..21: mol_type = other DNA; mol_type = other DNA
tgcaagaccccggacagggcc

SEQ ID NO: 29502 - DNA, 21 bp, synthetic construct
  source 1..21: mol_type = other DNA; mol_type = other DNA
tgtaagcctcaaaactcgagt

SEQ ID NO: 29503 - DNA, 21 bp, synthetic construct
  source 1..21: mol_type = other DNA; mol_type = other DNA
atcatggaggatcgcggttgg

SEQ ID NO: 29504 - DNA, 21 bp, synthetic construct
  source 1..21: mol_type = other DNA; mol_type = other DNA
tcttggagtacgaacgggata

SEQ ID NO: 29505 - DNA, 21 bp, synthetic construct
  source 1..21: mol_type = other DNA; mol_type = other DNA
tatcacaaacttaacattacc

SEQ ID NO: 29506 - DNA, 21 bp, synthetic construct
  source 1..21: mol_type = other DNA; mol_type = other DNA
ctccaccgcgcgggaatagac

SEQ ID NO: 29507 - DNA, 21 bp, synthetic construct
  source 1..21: mol_type = other DNA; mol_type = other DNA
tactggagtggcgttggagct

SEQ ID NO: 29508 - DNA, 21 bp, synthetic construct
  source 1..21: mol_type = other DNA; mol_type = other DNA
tatagccgaacgggaatgaac

SEQ ID NO: 29509 - DNA, 21 bp, synthetic construct
  source 1..21: mol_type = other DNA; mol_type = other DNA
tcggcatcaactaatgggagg

SEQ ID NO: 29510 - DNA, 21 bp, synthetic construct
  source 1..21: mol_type = other DNA; mol_type = other DNA
ctggccaagactggcatgaac

SEQ ID NO: 29511 - DNA, 21 bp, synthetic construct
  source 1..21: mol_type = other DNA; mol_type = other DNA
tatagtaggataatgcccaat

SEQ ID NO: 29512 - DNA, 21 bp, synthetic construct
  source 1..21: mol_type = other DNA; mol_type = other DNA
aggctatatgatgcttacgag

SEQ ID NO: 29513 - DNA, 21 bp, synthetic construct
  source 1..21: mol_type = other DNA; mol_type = other DNA
tatgcccgcgctggaaacaat

SEQ ID NO: 29514 - DNA, 21 bp, synthetic construct
  source 1..21: mol_type = other DNA; mol_type = other DNA
catcacaaactccaaactctt

SEQ ID NO: 29515 - DNA, 21 bp, synthetic construct
  source 1..21: mol_type = other DNA; mol_type = other DNA
tgtccacccaaggggccttcg

SEQ ID NO: 29516 - DNA, 21 bp, synthetic construct
  source 1..21: mol_type = other DNA; mol_type = other DNA
tgcaatagtcagaagttgggg

SEQ ID NO: 29517 - DNA, 21 bp, synthetic construct
  source 1..21: mol_type = other DNA; mol_type = other DNA
tacttcagtggccaagtcatg

SEQ ID NO: 29518 - DNA, 21 bp, synthetic construct
  source 1..21: mol_type = other DNA; mol_type = other DNA
acgcgggatggctacaacgct

SEQ ID NO: 29519 - DNA, 21 bp, synthetic construct
  source 1..21: mol_type = other DNA; mol_type = other DNA
tactctagcactcatggggtt

SEQ ID NO: 29520 - DNA, 21 bp, synthetic construct
  source 1..21: mol_type = other DNA; mol_type = other DNA
ggcagtgaccatgtgcgctgg

SEQ ID NO: 29521 - DNA, 21 bp, synthetic construct
  source 1..21: mol_type = other DNA; mol_type = other DNA
tgggcacccatgtgtaaggcg

SEQ ID NO: 29522 - DNA, 21 bp, synthetic construct
  source 1..21: mol_type = other DNA; mol_type = other DNA
tatgaatcaacgaacggcgta

SEQ ID NO: 29523 - DNA, 21 bp, synthetic construct
  source 1..21: mol_type = other DNA; mol_type = other DNA
aaaagtgatttcacgacgtac

SEQ ID NO: 29524 - DNA, 21 bp, synthetic construct
  source 1..21: mol_type = other DNA; mol_type = other DNA
tactcgaggattaacgataac

SEQ ID NO: 29525 - DNA, 21 bp, synthetic construct
  source 1..21: mol_type = other DNA; mol_type = other DNA
tgtaaccaagagacaaccagg

SEQ ID NO: 29526 - DNA, 21 bp, synthetic construct
  source 1..21: mol_type = other DNA; mol_type = other DNA
tacagccgagtcggttccaac

SEQ ID NO: 29527 - DNA, 21 bp, synthetic construct
  source 1..21: mol_type = other DNA; mol_type = other DNA
gaaaccggaatgtgcaagccg

SEQ ID NO: 29528 - DNA, 21 bp, synthetic construct
  source 1..21: mol_type = other DNA; mol_type = other DNA
agggagtcgaccaatggcata

SEQ ID NO: 29529 - DNA, 21 bp, synthetic construct
  source 1..21: mol_type = other DNA; mol_type = other DNA
tattctaggatgggagataac

SEQ ID NO: 29530 - DNA, 21 bp, synthetic construct
  source 1..21: mol_type = other DNA; mol_type = other DNA
tacgcaaggacgaacgacaat

SEQ ID NO: 29531 - DNA, 21 bp, synthetic construct
  source 1..21: mol_type = other DNA; mol_type = other DNA
tactttgccggtgtgcgagat

SEQ ID NO: 29532 - DNA, 21 bp, synthetic construct
  source 1..21: mol_type = other DNA; mol_type = other DNA
tttagtcgtgcggggcttaac

SEQ ID NO: 29533 - DNA, 21 bp, synthetic construct
  source 1..21: mol_type = other DNA
tactttcacggcaaacatgac

SEQ ID NO: 29534 - DNA, 21 bp, synthetic construct
  source 1..21: mol_type = other DNA
ttttggtctggcgttactgaa

SEQ ID NO: 29535 - DNA, 21 bp, synthetic construct
  source 1..21: mol_type = other DNA
gtacccgactttgtccgttac

SEQ ID NO: 29536 - DNA, 21 bp, synthetic construct
  source 1..21: mol_type = other DNA
ctgagcagggcttcacatgat

SEQ ID NO: 29537 - DNA, 21 bp, synthetic construct
  source 1..21: mol_type = other DNA
tattggagtggcacacatgag

SEQ ID NO: 29538 - DNA, 21 bp, synthetic construct
  source 1..21: mol_type = other DNA
ataaatggcgggaaatgcgat

SEQ ID NO: 29539 - DNA, 21 bp, synthetic construct
  source 1..21: mol_type = other DNA
tacgcgcgtttaggttacaat

SEQ ID NO: 29540 - DNA, 21 bp, synthetic construct
  source 1..21: mol_type = other DNA
tatttcagcggtaggcccgac

SEQ ID NO: 29541 - DNA, 21 bp, synthetic construct
  source 1..21: mol_type = other DNA
tactgggcagggaaagttgat

SEQ ID NO: 29542 - DNA, 21 bp, synthetic construct
  source 1..21: mol_type = other DNA
cgcacgcccacgacatttcca

SEQ ID NO: 29543 - DNA, 21 bp, synthetic construct
  source 1..21: mol_type = other DNA
tgcggtgccttgaggattagt

SEQ ID NO: 29544 - DNA, 21 bp, synthetic construct
  source 1..21: mol_type = other DNA
cacgagacatgtgttcgcgga

SEQ ID NO: 29545 - DNA, 21 bp, synthetic construct
  source 1..21: mol_type = other DNA
caaaatgaatttacgatgtat

SEQ ID NO: 29546 - DNA, 21 bp, synthetic construct
  source 1..21: mol_type = other DNA
tattggcatggagtctcggag

SEQ ID NO: 29547 - DNA, 21 bp, synthetic construct
  source 1..21: mol_type = other DNA
tactggagtggcgtaggtgag

SEQ ID NO: 29548 - DNA, 21 bp, synthetic construct
  source 1..21: mol_type = other DNA
cgttcagagttcgcagtctac

SEQ ID NO: 29549 - DNA, 21 bp, synthetic construct
  source 1..21: mol_type = other DNA
ggcggcgaggggattaggtgg

SEQ ID NO: 29550 - DNA, 21 bp, synthetic construct
  source 1..21: mol_type = other DNA
tattttgccggtcgcgcggac

SEQ ID NO: 29551 - DNA, 21 bp, synthetic construct
  source 1..21: mol_type = other DNA
tattcacgtgcgggcgatgat

SEQ ID NO: 29552 - DNA, 21 bp, synthetic construct
  source 1..21: mol_type = other DNA
tgtaaattcccagtaatggaa

SEQ ID NO: 29553 - DNA, 21 bp, synthetic construct
  source 1..21: mol_type = other DNA
caaggtgaagcccgcagttgg

SEQ ID NO: 29554 - DNA, 21 bp, synthetic construct
  source 1..21: mol_type = other DNA
ttcttttcgggccaaatcgag

SEQ ID NO: 29555 - DNA, 21 bp, synthetic construct
  source 1..21: mol_type = other DNA
tactacagtgggattacagcc

SEQ ID NO: 29556 - DNA, 21 bp, synthetic construct
  source 1..21: mol_type = other DNA
agggattatgatgccttccca

SEQ ID NO: 29557 - DNA, 21 bp, synthetic construct
  source 1..21: mol_type = other DNA
ccatacgcgagatctgctgat

SEQ ID NO: 29558 - DNA, 21 bp, synthetic construct
  source 1..21: mol_type = other DNA
aaagacgattttgtagcgtat

SEQ ID NO: 29559 - DNA, 21 bp, synthetic construct
  source 1..21: mol_type = other DNA
tattttacaggggtgactaat

SEQ ID NO: 29560 - DNA, 21 bp, synthetic construct
  source 1..21: mol_type = other DNA
gcaatggtcgctcgtgattgg

SEQ ID NO: 29561 - DNA, 21 bp, synthetic construct
  source 1..21: mol_type = other DNA
ctagcacggtccggggaaaat

SEQ ID NO: 29562 - DNA, 21 bp, synthetic construct
  source 1..21: mol_type = other DNA
cattggtcgacaaatggagtg

SEQ ID NO: 29563 - DNA, 21 bp, synthetic construct
  source 1..21: mol_type = other DNA
acatacagcacaaatggggtc

SEQ ID NO: 29564 - DNA, 21 bp, synthetic construct
  source 1..21: mol_type = other DNA
tatttcgctggggtcagggac

SEQ ID NO: 29565 - DNA, 21 bp, synthetic construct
  source 1..21: mol_type = other DNA
tattcacggataggtagtaat

SEQ ID NO: 29566 - DNA, 21 bp, synthetic construct
  source 1..21: mol_type = other DNA; mol_type = other DNA
tatagtagaggtggacctaat

SEQ ID NO: 29567 - DNA, 21 bp, synthetic construct
  source 1..21: mol_type = other DNA; mol_type = other DNA
aaagatgatttcacagggtat

SEQ ID NO: 29568 - DNA, 21 bp, synthetic construct
  source 1..21: mol_type = other DNA; mol_type = other DNA
tattttcatggcctacgtgag

SEQ ID NO: 29569 - DNA, 21 bp, synthetic construct
  source 1..21: mol_type = other DNA; mol_type = other DNA
tggtggggtggggtaaaagaa

SEQ ID NO: 29570 - DNA, 21 bp, synthetic construct
  source 1..21: mol_type = other DNA; mol_type = other DNA
tatcatcgattgggggacagc

SEQ ID NO: 29571 - DNA, 21 bp, synthetic construct
  source 1..21: mol_type = other DNA; mol_type = other DNA
agaggcgaattcgtgccgttt

SEQ ID NO: 29572 - DNA, 21 bp, synthetic construct
  source 1..21: mol_type = other DNA; mol_type = other DNA
tatgcgagaagcaatcctaat

SEQ ID NO: 29573 - DNA, 21 bp, synthetic construct
  source 1..21: mol_type = other DNA; mol_type = other DNA
aaggacgattggacaagctac

SEQ ID NO: 29574 - DNA, 21 bp, synthetic construct
  source 1..21: mol_type = other DNA; mol_type = other DNA
tacgtaagaagccaaatgctt

SEQ ID NO: 29575 - DNA, 21 bp, synthetic construct
  source 1..21: mol_type = other DNA; mol_type = other DNA
tatacacgtgtccaagaaaat

SEQ ID NO: 29576 - DNA, 21 bp, synthetic construct
  source 1..21: mol_type = other DNA; mol_type = other DNA
ggcggagagggatcgaagtgg

SEQ ID NO: 29577 - DNA, 21 bp, synthetic construct
  source 1..21: mol_type = other DNA; mol_type = other DNA
tatgctagaacaggctataac

SEQ ID NO: 29578 - DNA, 21 bp, synthetic construct
  source 1..21: mol_type = other DNA; mol_type = other DNA
tgtaagaccaagagccaagat

SEQ ID NO: 29579 - DNA, 21 bp, synthetic construct
  source 1..21: mol_type = other DNA; mol_type = other DNA
ccatacgctaagagtagcgag

SEQ ID NO: 29580 - DNA, 21 bp, synthetic construct
  source 1..21: mol_type = other DNA; mol_type = other DNA
tattcaaagcacgggatgaat

SEQ ID NO: 29581 - DNA, 21 bp, synthetic construct
  source 1..21: mol_type = other DNA; mol_type = other DNA
tatgctcgtttgggtaccaac

SEQ ID NO: 29582 - DNA, 21 bp, synthetic construct
  source 1..21: mol_type = other DNA; mol_type = other DNA
ttatctaaggtgggctttgat

SEQ ID NO: 29583 - DNA, 21 bp, synthetic construct
  source 1..21: mol_type = other DNA; mol_type = other DNA
gctcccccccacatcaagtgg

SEQ ID NO: 29584 - DNA, 21 bp, synthetic construct
  source 1..21: mol_type = other DNA; mol_type = other DNA
ccgatggggagtaatacgtgg

SEQ ID NO: 29585 - DNA, 21 bp, synthetic construct
  source 1..21: mol_type = other DNA; mol_type = other DNA
tttaatagcaccaacggtgtc

SEQ ID NO: 29586 - DNA, 21 bp, synthetic construct
  source 1..21: mol_type = other DNA; mol_type = other DNA
ctaacaaaattgagtaacaat

SEQ ID NO: 29587 - DNA, 21 bp, synthetic construct
  source 1..21: mol_type = other DNA; mol_type = other DNA
tatagtcgaatttccgacaat

SEQ ID NO: 29588 - DNA, 21 bp, synthetic construct
  source 1..21: mol_type = other DNA; mol_type = other DNA
tatcaccgattggatcccaat

SEQ ID NO: 29589 - DNA, 21 bp, synthetic construct
  source 1..21: mol_type = other DNA; mol_type = other DNA
tactatactggtatcttggaa

SEQ ID NO: 29590 - DNA, 21 bp, synthetic construct
  source 1..21: mol_type = other DNA; mol_type = other DNA
cacttggcttcccatgattgg

SEQ ID NO: 29591 - DNA, 21 bp, synthetic construct
  source 1..21: mol_type = other DNA; mol_type = other DNA
catccctccaggtgcccggaa

SEQ ID NO: 29592 - DNA, 21 bp, synthetic construct
  source 1..21: mol_type = other DNA; mol_type = other DNA
tattggacgggcactacagcc

SEQ ID NO: 29593 - DNA, 21 bp, synthetic construct
  source 1..21: mol_type = other DNA; mol_type = other DNA
tactacactggcattacggag

SEQ ID NO: 29594 - DNA, 21 bp, synthetic construct
  source 1..21: mol_type = other DNA; mol_type = other DNA
tacgcgcgtatagggcaaaat

SEQ ID NO: 29595 - DNA, 21 bp, synthetic construct
  source 1..21: mol_type = other DNA; mol_type = other DNA
acctggacaggtgaaaatgct

SEQ ID NO: 29596 - DNA, 21 bp, synthetic construct
  source 1..21: mol_type = other DNA; mol_type = other DNA
gatatgcaatctaacttgtgg

SEQ ID NO: 29597 - DNA, 21 bp, synthetic construct
  source 1..21: mol_type = other DNA; mol_type = other DNA
cggagtaactttgttttccca

SEQ ID NO: 29598 - DNA, 21 bp, synthetic construct
  source 1..21: mol_type = other DNA; mol_type = other DNA
tactcacgtatgggtgttaac

SEQ ID NO: 29599 - DNA, 21 bp, synthetic construct
  source 1..21: mol_type = other DNA; mol_type = other DNA
ttcttcagtgggatacgagat

SEQ ID NO: 29600 - DNA, 21 bp, synthetic construct
  source 1..21: mol_type = other DNA; mol_type = other DNA
ggttcagagcacgtaagatgg

SEQ ID NO: 29601 - DNA, 21 bp, synthetic construct
  source 1..21: mol_type = other DNA; mol_type = other DNA
cggggtccagacacttttcct

SEQ ID NO: 29602 - DNA, 21 bp, synthetic construct
  source 1..21: mol_type = other DNA; mol_type = other DNA
gatcctagcagtagcaagtgg

SEQ ID NO: 29603 - DNA, 21 bp, synthetic construct
  source 1..21: mol_type = other DNA; mol_type = other DNA
tatagccgcgcaggatccaat

SEQ ID NO: 29604 - DNA, 21 bp, synthetic construct
  source 1..21: mol_type = other DNA; mol_type = other DNA
ttctggagtgggattgtcgag

SEQ ID NO: 29605 - DNA, 21 bp, synthetic construct
  source 1..21: mol_type = other DNA; mol_type = other DNA
tatgcacgaattggtaacaac

SEQ ID NO: 29606 - DNA, 21 bp, synthetic construct
  source 1..21: mol_type = other DNA; mol_type = other DNA
tgcgcgcctatgttacatgaa

SEQ ID NO: 29607 - DNA, 21 bp, synthetic construct
  source 1..21: mol_type = other DNA; mol_type = other DNA
tacttttctggtcgtccggat

SEQ ID NO: 29608 - DNA, 21 bp, synthetic construct
  source 1..21: mol_type = other DNA; mol_type = other DNA
tattttcacgggcagttggat

SEQ ID NO: 29609 - DNA, 21 bp, synthetic construct
  source 1..21: mol_type = other DNA; mol_type = other DNA
tgcaaaccagggaccccagct

SEQ ID NO: 29610 - DNA, 21 bp, synthetic construct
  source 1..21: mol_type = other DNA; mol_type = other DNA
atgtttgacgggaccagagct

SEQ ID NO: 29611 - DNA, 21 bp, synthetic construct
  source 1..21: mol_type = other DNA; mol_type = other DNA
tatgtccggtcaaatccttta

SEQ ID NO: 29612 - DNA, 21 bp, synthetic construct
  source 1..21: mol_type = other DNA; mol_type = other DNA
ctgagccgcgtcagtcccgac

SEQ ID NO: 29613 - DNA, 21 bp, synthetic construct
  source 1..21: mol_type = other DNA; mol_type = other DNA
tatgcaagactcggactgaat

SEQ ID NO: 29614 - DNA, 21 bp, synthetic construct
  source 1..21: mol_type = other DNA; mol_type = other DNA
catgatggggttagcaaatgg

SEQ ID NO: 29615 - DNA, 21 bp, synthetic construct
  source 1..21: mol_type = other DNA; mol_type = other DNA
taccacgcgaagcaagacaat

SEQ ID NO: 29616 - DNA, 21 bp, synthetic construct
  source 1..21: mol_type = other DNA; mol_type = other DNA
tactttcacggtaagagcgac

SEQ ID NO: 29617 - DNA, 21 bp, synthetic construct
  source 1..21: mol_type = other DNA; mol_type = other DNA
ttttcgcgtttaaataccaat

SEQ ID NO: 29618 - DNA, 21 bp, synthetic construct
  source 1..21: mol_type = other DNA; mol_type = other DNA
ctagcgaaaactggaacaaac

SEQ ID NO: 29619 - DNA, 21 bp, synthetic construct
  source 1..21: mol_type = other DNA; mol_type = other DNA
tacagtaggcacaacgagaac

SEQ ID NO: 29620 - DNA, 21 bp, synthetic construct
  source 1..21: mol_type = other DNA; mol_type = other DNA
agtatgcaggcccggtcttgg

SEQ ID NO: 29621 - DNA, 21 bp, synthetic construct
  source 1..21: mol_type = other DNA; mol_type = other DNA
aggggggatagtagaagctgg

SEQ ID NO: 29622 - DNA, 21 bp, synthetic construct
  source 1..21: mol_type = other DNA; mol_type = other DNA
ttttcgcgcttaaatcataat

SEQ ID NO: 29623 - DNA, 21 bp, synthetic construct
  source 1..21: mol_type = other DNA; mol_type = other DNA
tacttttcgggcgtaatgccc

SEQ ID NO: 29624 - DNA, 21 bp, synthetic construct
  source 1..21: mol_type = other DNA; mol_type = other DNA
tttttttccgggagggtcgag

SEQ ID NO: 29625 - DNA, 21 bp, synthetic construct
  source 1..21: mol_type = other DNA; mol_type = other DNA
taccatgctcgccagatcaac

SEQ ID NO: 29626 - DNA, 21 bp, synthetic construct
  source 1..21: mol_type = other DNA; mol_type = other DNA
agagacgagttcgtttcgttc

SEQ ID NO: 29627 - DNA, 21 bp, synthetic construct
  source 1..21: mol_type = other DNA; mol_type = other DNA
cagttagactcaagagattgg

SEQ ID NO: 29628 - DNA, 21 bp, synthetic construct
  source 1..21: mol_type = other DNA; mol_type = other DNA
tattggacgggcatgcaagcc

SEQ ID NO: 29629 - DNA, 21 bp, synthetic construct
  source 1..21: mol_type = other DNA; mol_type = other DNA
cgatatgagcccaaatgcccc

SEQ ID NO: 29630 - DNA, 21 bp, synthetic construct
  source 1..21: mol_type = other DNA; mol_type = other DNA
gaaaatgcctcacgtgcttgg

SEQ ID NO: 29631 - DNA, 21 bp, synthetic construct
  source 1..21: mol_type = other DNA; mol_type = other DNA
tattcacgtttacacgtcgat

SEQ ID NO: 29632 - DNA, 21 bp, synthetic construct
  source 1..21: mol_type = other DNA; mol_type = other DNA
ctccatcgccttcacccggac

SEQ ID NO: 29633 - DNA, 21 bp, synthetic construct
  source 1..21: mol_type = other DNA; mol_type = other DNA
aatatggaagaccgcaagtgg

SEQ ID NO: 29634 - DNA, 21 bp, synthetic construct
  source 1..21: mol_type = other DNA; mol_type = other DNA
gacctttccagcggaaattgg

SEQ ID NO: 29635 - DNA, 21 bp, synthetic construct
  source 1..21: mol_type = other DNA; mol_type = other DNA
agtatgcaagatcgtacctgg

SEQ ID NO: 29636 - DNA, 21 bp, synthetic construct
  source 1..21: mol_type = other DNA; mol_type = other DNA
tattttagtggtgtgacaaac

SEQ ID NO: 29637 - DNA, 21 bp, synthetic construct
  source 1..21: mol_type = other DNA; mol_type = other DNA
ttcttttcaggaatcatggag

SEQ ID NO: 29638 - DNA, 21 bp, synthetic construct
  source 1..21: mol_type = other DNA; mol_type = other DNA
ttctttacaggtaaattggac

SEQ ID NO: 29639 - DNA, 21 bp, synthetic construct
  source 1..21: mol_type = other DNA; mol_type = other DNA
tactcacggcttaatctgaat

SEQ ID NO: 29640 - DNA, 21 bp, synthetic construct
  source 1..21: mol_type = other DNA; mol_type = other DNA
tatgctaaaggaaacgtaaac

SEQ ID NO: 29641 - DNA, 21 bp, synthetic construct
  source 1..21: mol_type = other DNA; mol_type = other DNA
gatctatcttctaactcatgg

SEQ ID NO: 29642 - DNA, 21 bp, synthetic construct
  source 1..21: mol_type = other DNA; mol_type = other DNA
tacagtaggttgcagtcaaca

SEQ ID NO: 29643 - DNA, 21 bp, synthetic construct
  source 1..21: mol_type = other DNA; mol_type = other DNA
tttagtcgcatcggctcaaac

SEQ ID NO: 29644 - DNA, 21 bp, synthetic construct
  source 1..21: mol_type = other DNA; mol_type = other DNA
tacgtcaaaagccaaccgcaa

SEQ ID NO: 29645 - DNA, 21 bp, synthetic construct
  source 1..21: mol_type = other DNA; mol_type = other DNA
tatagcaaacttgatccactc

SEQ ID NO: 29646 - DNA, 21 bp, synthetic construct
  source 1..21: mol_type = other DNA; mol_type = other DNA
tatcatgctaaacaagataac

SEQ ID NO: 29647 - DNA, 21 bp, synthetic construct
  source 1..21: mol_type = other DNA; mol_type = other DNA
aaaagtgaattccgttcattc

SEQ ID NO: 29648 - DNA, 21 bp, synthetic construct
  source 1..21: mol_type = other DNA; mol_type = other DNA
gaaaatgagtttaaaatcttt

SEQ ID NO: 29649 - DNA, 21 bp, synthetic construct
  source 1..21: mol_type = other DNA; mol_type = other DNA
gccaggagtactaacggtata

SEQ ID NO: 29650 - DNA, 21 bp, synthetic construct
  source 1..21: mol_type = other DNA; mol_type = other DNA
gtgatgagggatcgaggatgg

SEQ ID NO: 29651 - DNA, 21 bp, synthetic construct
  source 1..21: mol_type = other DNA; mol_type = other DNA
tatttcaccggcagcagggag

SEQ ID NO: 29652 - DNA, 21 bp, synthetic construct
  source 1..21: mol_type = other DNA; mol_type = other DNA
cgaacccgcgatagctatccg

SEQ ID NO: 29653 - DNA, 21 bp, synthetic construct
  source 1..21: mol_type = other DNA; mol_type = other DNA
atgatggatggcacacccgca

SEQ ID NO: 29654 - DNA, 21 bp, synthetic construct
  source 1..21: mol_type = other DNA; mol_type = other DNA
tactcacgaattggcccgcac

SEQ ID NO: 29655 - DNA, 21 bp, synthetic construct
  source 1..21: mol_type = other DNA; mol_type = other DNA
cgctctgaatttaccggttac

SEQ ID NO: 29656 - DNA, 21 bp, synthetic construct
  source 1..21: mol_type = other DNA; mol_type = other DNA
ctcagcaaagctggtataaac

SEQ ID NO: 29657 - DNA, 21 bp, synthetic construct
  source 1..21: mol_type = other DNA; mol_type = other DNA
aaggatggttttagtggatgg

SEQ ID NO: 29658 - DNA, 21 bp, synthetic construct
  source 1..21: mol_type = other DNA; mol_type = other DNA
tgtaaacctccatcgggtcct

SEQ ID NO: 29659 - DNA, 21 bp, synthetic construct
  source 1..21: mol_type = other DNA; mol_type = other DNA
ttctcgcggatcggaatgaat

SEQ ID NO: 29660 - DNA, 21 bp, synthetic construct
  source 1..21: mol_type = other DNA; mol_type = other DNA
gtaatggattcacgcgactgg

SEQ ID NO: 29661 - DNA, 21 bp, synthetic construct
  source 1..21: mol_type = other DNA; mol_type = other DNA
aaatatgatcacgtcgcctgg

SEQ ID NO: 29662 - DNA, 21 bp, synthetic construct
  source 1..21: mol_type = other DNA; mol_type = other DNA
ctatcgaaagcaggagcgaat

SEQ ID NO: 29663 - DNA, 21 bp, synthetic construct
  source 1..21: mol_type = other DNA; mol_type = other DNA
acatggaccggagagaacgca

SEQ ID NO: 29664 - DNA, 21 bp, synthetic construct
  source 1..21: mol_type = other DNA; mol_type = other DNA
catagatcgaccaatggtgta

SEQ ID NO: 29665 - DNA, 21 bp, synthetic construct
  source 1..21: mol_type = other DNA; mol_type = other DNA
tttgcaagaaccgggatgaat

SEQ ID NO: 29666 - DNA, 21 bp, synthetic construct
  source 1..21: mol_type = other DNA; mol_type = other DNA
gatccgagcagccgtgcatgg

SEQ ID NO: 29667 - DNA, 21 bp, synthetic construct
  source 1..21: mol_type = other DNA; mol_type = other DNA
ttcagcagagttggctctaac

SEQ ID NO: 29668 - DNA, 21 bp, synthetic construct
  source 1..21: mol_type = other DNA; mol_type = other DNA
aaagacgaataccttaccttc

SEQ ID NO: 29669 - DNA, 21 bp, synthetic construct
  source 1..21: mol_type = other DNA; mol_type = other DNA
agagatggaagcagcacgtgg

SEQ ID NO: 29670 - DNA, 21 bp, synthetic construct
  source 1..21: mol_type = other DNA; mol_type = other DNA
tatagccgtagcggcgcaaat

SEQ ID NO: 29671 - DNA, 21 bp, synthetic construct
  source 1..21: mol_type = other DNA; mol_type = other DNA
tattttgccggtatccaggct

SEQ ID NO: 29672 - DNA, 21 bp, synthetic construct
  source 1..21: mol_type = other DNA; mol_type = other DNA
aaaccagctaattatgattgt

SEQ ID NO: 29673 - DNA, 21 bp, synthetic construct
  source 1..21: mol_type = other DNA; mol_type = other DNA
tgtagtaataagcaaacacca

SEQ ID NO: 29674 - DNA, 21 bp, synthetic construct
  source 1..21: mol_type = other DNA; mol_type = other DNA
tacgcaagggctggcgctaac

SEQ ID NO: 29675 - DNA, 21 bp, synthetic construct
  source 1..21: mol_type = other DNA; mol_type = other DNA
ggaagtcctagcagcagttgg

SEQ ID NO: 29676 - DNA, 21 bp, synthetic construct
  source 1..21: mol_type = other DNA; mol_type = other DNA
tactacagtcgaatcatagaa

SEQ ID NO: 29677 - DNA, 21 bp, synthetic construct
  source 1..21: mol_type = other DNA; mol_type = other DNA
tattttgagggccgcatcgac

SEQ ID NO: 29678 - DNA, 21 bp, synthetic construct
  source 1..21: mol_type = other DNA; mol_type = other DNA
tttcagtctaccaatggagtg

SEQ ID NO: 29679 - DNA, 21 bp, synthetic construct
  source 1..21: mol_type = other DNA; mol_type = other DNA
tatgcgagattaagtccacta

SEQ ID NO: 29680 - DNA, 21 bp, synthetic construct
  source 1..21: mol_type = other DNA; mol_type = other DNA
tactgggctggcattgtagac

SEQ ID NO: 29681 - DNA, 21 bp, synthetic construct
  source 1..21: mol_type = other DNA; mol_type = other DNA
tttgcgaggactggcctaaac

SEQ ID NO: 29682 - DNA, 21 bp, synthetic construct
  source 1..21: mol_type = other DNA; mol_type = other DNA
ttcagtaaagtgggcgcaaac

SEQ ID NO: 29683 - DNA, 21 bp, synthetic construct
  source 1..21: mol_type = other DNA; mol_type = other DNA
tattcaaggactaatgataat

SEQ ID NO: 29684 - DNA, 21 bp, synthetic construct
  source 1..21: mol_type = other DNA; mol_type = other DNA
tacagtaagagtaacaataac

SEQ ID NO: 29685 - DNA, 21 bp, synthetic construct
  source 1..21: mol_type = other DNA; mol_type = other DNA
ttctttagtggcagggtagaa

SEQ ID NO: 29686 - DNA, 21 bp, synthetic construct
  source 1..21: mol_type = other DNA; mol_type = other DNA
tggtattctggaattaaagaa

SEQ ID NO: 29687 - DNA, 21 bp, synthetic construct
  source 1..21: mol_type = other DNA; mol_type = other DNA
tatagtaagcaaaatgagaac

SEQ ID NO: 29688 - DNA, 21 bp, synthetic construct
  source 1..21: mol_type = other DNA; mol_type = other DNA
tgcactagtgactctttcccg

SEQ ID NO: 29689 - DNA, 21 bp, synthetic construct
  source 1..21: mol_type = other DNA; mol_type = other DNA
tattccaggtctaacgacaat

SEQ ID NO: 29690 - DNA, 21 bp, synthetic construct
  source 1..21: mol_type = other DNA; mol_type = other DNA
tacatgtcgactaatggggta

SEQ ID NO: 29691 - DNA, 21 bp, synthetic construct
  source 1..21: mol_type = other DNA; mol_type = other DNA
cgaacactggattgcgacaga

SEQ ID NO: 29692 - DNA, 21 bp, synthetic construct
  source 1..21: mol_type = other DNA; mol_type = other DNA
tatagccgcatgggaacgaat

SEQ ID NO: 29693 - DNA, 21 bp, synthetic construct
  source 1..21: mol_type = other DNA; mol_type = other DNA
tggtggcatggagtttcagca

SEQ ID NO: 29694 - DNA, 21 bp, synthetic construct
  source 1..21: mol_type = other DNA; mol_type = other DNA
tgcaagccgggagccggcaca

SEQ ID NO: 29695 - DNA, 21 bp, synthetic construct
  source 1..21: mol_type = other DNA; mol_type = other DNA
gtagctcgcgagggttgggac

SEQ ID NO: 29696 - DNA, 21 bp, synthetic construct
  source 1..21: mol_type = other DNA; mol_type = other DNA
tgcggaaaacgcgaccccgat

SEQ ID NO: 29697 - DNA, 21 bp, synthetic construct
  source 1..21: mol_type = other DNA; mol_type = other DNA
tgcaagcccggtccaggcatg

SEQ ID NO: 29698 - DNA, 21 bp, synthetic construct
  source 1..21: mol_type = other DNA; mol_type = other DNA
tacagtcgcctcggtactaat

SEQ ID NO: 29699 - DNA, 21 bp, synthetic construct
  source 1..21: mol_type = other DNA; mol_type = other DNA
tatatcaagtcgcaaacatgt

SEQ ID NO: 29700 - DNA, 21 bp, synthetic construct
  source 1..21: mol_type = other DNA; mol_type = other DNA
cagaatgaccatgttaggtgg

SEQ ID NO: 29701 - DNA, 21 bp, synthetic construct
  source 1..21: mol_type = other DNA; mol_type = other DNA
cgcgatggcatgtctagctgg

SEQ ID NO: 29702 - DNA, 21 bp, synthetic construct
  source 1..21: mol_type = other DNA; mol_type = other DNA
ggcagtataagtagcacttgg

SEQ ID NO: 29703 - DNA, 21 bp, synthetic construct
  source 1..21: mol_type = other DNA; mol_type = other DNA
tttagcagggtaagcgataac

SEQ ID NO: 29704 - DNA, 21 bp, synthetic construct
  source 1..21: mol_type = other DNA; mol_type = other DNA
ttggcaaagttgggtccgaac

SEQ ID NO: 29705 - DNA, 21 bp, synthetic construct
  source 1..21: mol_type = other DNA; mol_type = other DNA
tattcccgagtgaacttcaat

SEQ ID NO: 29706 - DNA, 21 bp, synthetic construct
  source 1..21: mol_type = other DNA; mol_type = other DNA
tgtcgtagtggagcagcattg

SEQ ID NO: 29707 - DNA, 21 bp, synthetic construct
  source 1..21: mol_type = other DNA; mol_type = other DNA
ttttcgagactgaatcttaac

SEQ ID NO: 29708 - DNA, 21 bp, synthetic construct
  source 1..21: mol_type = other DNA; mol_type = other DNA
tgtatgagtacaagtagaagc

SEQ ID NO: 29709 - DNA, 21 bp, synthetic construct
  source 1..21: mol_type = other DNA; mol_type = other DNA
tacgcacgttctggacagaat

SEQ ID NO: 29710 - DNA, 21 bp, synthetic construct
  source 1..21: mol_type = other DNA; mol_type = other DNA
tacagccgactcaacttcaac

SEQ ID NO: 29711 - DNA, 21 bp, synthetic construct
  source 1..21: mol_type = other DNA; mol_type = other DNA
gtaatgggggatcgcaaatgg

SEQ ID NO: 29712 - DNA, 21 bp, synthetic construct
  source 1..21: mol_type = other DNA; mol_type = other DNA
tgtaagaggggactccccgaa

SEQ ID NO: 29713 - DNA, 21 bp, synthetic construct
  source 1..21: mol_type = other DNA; mol_type = other DNA
tgcaaaccttcgcctttggag

SEQ ID NO: 29714 - DNA, 21 bp, synthetic construct
  source 1..21: mol_type = other DNA; mol_type = other DNA
tattatagcggaatcagggac

SEQ ID NO: 29715 - DNA, 21 bp, synthetic construct
  source 1..21: mol_type = other DNA; mol_type = other DNA
cccttgagttcccaatcctgg

SEQ ID NO: 29716 - DNA, 21 bp, synthetic construct
  source 1..21: mol_type = other DNA; mol_type = other DNA
tggtggtcgcaagtaaaggaa

SEQ ID NO: 29717 - DNA, 21 bp, synthetic construct
  source 1..21: mol_type = other DNA; mol_type = other DNA
tactcaagaaccgggatcaat

SEQ ID NO: 29718 - DNA, 21 bp, synthetic construct
  source 1..21: mol_type = other DNA; mol_type = other DNA
tcaatgcaagatcgcttgtgg

SEQ ID NO: 29719 - DNA, 21 bp, synthetic construct
  source 1..21: mol_type = other DNA; mol_type = other DNA
tactttactggcgagatggag

SEQ ID NO: 29720 - DNA, 21 bp, synthetic construct
  source 1..21: mol_type = other DNA; mol_type = other DNA
tacgctaggggaaacccaaac

SEQ ID NO: 29721 - DNA, 21 bp, synthetic construct
  source 1..21: mol_type = other DNA; mol_type = other DNA
tggtttagcggcaaaatcgat

SEQ ID NO: 29722 - DNA, 21 bp, synthetic construct
  source 1..21: mol_type = other DNA; mol_type = other DNA
gtgccggacagcgtcaggtgg

SEQ ID NO: 29723 - DNA, 21 bp, synthetic construct
  source 1..21: mol_type = other DNA; mol_type = other DNA
tacagtaagtcaggctggaat

SEQ ID NO: 29724 - DNA, 21 bp, synthetic construct
  source 1..21: mol_type = other DNA; mol_type = other DNA
tattcgaagcacggtgctaac

SEQ ID NO: 29725 - DNA, 21 bp, synthetic construct
  source 1..21: mol_type = other DNA; mol_type = other DNA
ggaagcgggcaaagctcgtgg

SEQ ID NO: 29726 - DNA, 21 bp, synthetic construct
  source 1..21: mol_type = other DNA; mol_type = other DNA
aagaaatacgaaatcaataac

SEQ ID NO: 29727 - DNA, 21 bp, synthetic construct
  source 1..21: mol_type = other DNA; mol_type = other DNA
tgccgtgataaaaatgtcgag

SEQ ID NO: 29728 - DNA, 21 bp, synthetic construct
  source 1..21: mol_type = other DNA; mol_type = other DNA
ttgcctgacggcgatggtcct

SEQ ID NO: 29729 - DNA, 21 bp, synthetic construct
  source 1..21: mol_type = other DNA; mol_type = other DNA
gggggtgaaggcagtaaatgg

SEQ ID NO: 29730 - DNA, 21 bp, synthetic construct
  source 1..21: mol_type = other DNA; mol_type = other DNA
cagggtgtctcaagggagtgg

SEQ ID NO: 29731 - DNA, 21 bp, synthetic construct
  source 1..21: mol_type = other DNA; mol_type = other DNA
ggttcgggaaccagctcatgg

SEQ ID NO: 29732 - DNA, 21 bp, synthetic construct
  source 1..21: mol_type = other DNA; mol_type = other DNA
ttttcaaggttaaataataac

SEQ ID NO: 29733 - DNA, 21 bp, synthetic construct
  source 1..21: mol_type = other DNA; mol_type = other DNA
tgcaagtcggagatgaaaatg

SEQ ID NO: 29734 - DNA, 21 bp, synthetic construct
  source 1..21: mol_type = other DNA; mol_type = other DNA
cggagcgaattcactagttat

SEQ ID NO: 29735 - DNA, 21 bp, synthetic construct
  source 1..21: mol_type = other DNA; mol_type = other DNA
attctggaatcgagggattgg

SEQ ID NO: 29736 - DNA, 21 bp, synthetic construct
  source 1..21: mol_type = other DNA; mol_type = other DNA
tacagcaaatctaacgtaaat

SEQ ID NO: 29737 - DNA, 21 bp, synthetic construct
  source 1..21: mol_type = other DNA; mol_type = other DNA
ggcagtgagtttagtacctac

SEQ ID NO: 29738 - DNA, 21 bp, synthetic construct
  source 1..21: mol_type = other DNA; mol_type = other DNA
tatgttaggttcgatcaaggg

SEQ ID NO: 29739 - DNA, 21 bp, synthetic construct
  source 1..21: mol_type = other DNA; mol_type = other DNA
tgggtaaagagccagcaacac

SEQ ID NO: 29740 - DNA, 21 bp, synthetic construct
  source 1..21: mol_type = other DNA; mol_type = other DNA
gaattacaaagcagcaaatgg

SEQ ID NO: 29741 - DNA, 21 bp, synthetic construct
  source 1..21: mol_type = other DNA; mol_type = other DNA
tactcaaaatcaaataacaat

SEQ ID NO: 29742 - DNA, 21 bp, synthetic construct
  source 1..21: mol_type = other DNA; mol_type = other DNA
atcgcttcaactaatggaatt

SEQ ID NO: 29743 - DNA, 21 bp, synthetic construct
  source 1..21: mol_type = other DNA; mol_type = other DNA
gggagcaatacatcaagatgg

SEQ ID NO: 29744 - DNA, 21 bp, synthetic construct
  source 1..21: mol_type = other DNA; mol_type = other DNA
ccctgcgggccgtgcacatac

SEQ ID NO: 29745 - DNA, 21 bp, synthetic construct
  source 1..21: mol_type = other DNA; mol_type = other DNA
gctcccaacactgtaaagtgg

SEQ ID NO: 29746 - DNA, 21 bp, synthetic construct
  source 1..21: mol_type = other DNA; mol_type = other DNA
cgccttgaccatgtatacccg

SEQ ID NO: 29747 - DNA, 21 bp, synthetic construct
  source 1..21: mol_type = other DNA; mol_type = other DNA
ttggcaaagtctggtatgaat

SEQ ID NO: 29748 - DNA, 21 bp, synthetic construct
  source 1..21: mol_type = other DNA; mol_type = other DNA
ataagcggtcgtggatgggac

SEQ ID NO: 29749 - DNA, 21 bp, synthetic construct
  source 1..21: mol_type = other DNA; mol_type = other DNA
agaggggtagacatgtatcca

SEQ ID NO: 29750 - DNA, 21 bp, synthetic construct
  source 1..21: mol_type = other DNA; mol_type = other DNA
tatagccgcttggatagggac

SEQ ID NO: 29751 - DNA, 21 bp, synthetic construct
  source 1..21: mol_type = other DNA; mol_type = other DNA
atggacgacttcacagtgtat

SEQ ID NO: 29752 - DNA, 21 bp, synthetic construct
  source 1..21: mol_type = other DNA; mol_type = other DNA
tacgctcggtccggaggcaat

SEQ ID NO: 29753 - DNA, 21 bp, synthetic construct
  source 1..21: mol_type = other DNA; mol_type = other DNA
tattccagggtcaatgtgaat

SEQ ID NO: 29754 - DNA, 21 bp, synthetic construct
  source 1..21: mol_type = other DNA; mol_type = other DNA
ggttccggcacgtcgagttgg

SEQ ID NO: 29755 - DNA, 21 bp, synthetic construct
  source 1..21: mol_type = other DNA; mol_type = other DNA
ttcagtaggttagggtcaaat

SEQ ID NO: 29756 - DNA, 21 bp, synthetic construct
  source 1..21: mol_type = other DNA; mol_type = other DNA
tatcatgctcgccaggccaac

SEQ ID NO: 29757 - DNA, 21 bp, synthetic construct
  source 1..21: mol_type = other DNA; mol_type = other DNA
ttaaaaaagccttgtttaacc

SEQ ID NO: 29758 - DNA, 21 bp, synthetic construct
  source 1..21: mol_type = other DNA; mol_type = other DNA
tgtaaaccgcccccaatagaa

SEQ ID NO: 29759 - DNA, 21 bp, synthetic construct
  source 1..21: mol_type = other DNA; mol_type = other DNA
atagtcagcacgaatgggata

SEQ ID NO: 29760 - DNA, 21 bp, synthetic construct
  source 1..21: mol_type = other DNA; mol_type = other DNA
taccacaaactacaatacggg

SEQ ID NO: 29761 - DNA, 21 bp, synthetic construct
  source 1..21: mol_type = other DNA; mol_type = other DNA
tattcacgtagcggcgataat

SEQ ID NO: 29762 - DNA, 21 bp, synthetic construct
  source 1..21: mol_type = other DNA; mol_type = other DNA
tatgttcgttcagaccgggcg

SEQ ID NO: 29763 - DNA, 21 bp, synthetic construct
  source 1..21: mol_type = other DNA; mol_type = other DNA
cgcgaagagatggtcagctgg

SEQ ID NO: 29764 - DNA, 21 bp, synthetic construct
  source 1..21: mol_type = other DNA; mol_type = other DNA
tatgccaggataggacacaat

SEQ ID NO: 29765 - DNA, 21 bp, synthetic construct
  source 1..21: mol_type = other DNA; mol_type = other DNA
tacttcagtggccagataatg

SEQ ID NO: 29766 - DNA, 21 bp, synthetic construct
  source 1..21: mol_type = other DNA; mol_type = other DNA
aaagacgactatagttactat

SEQ ID NO: 29767 - DNA, 21 bp, synthetic construct
  source 1..21: mol_type = other DNA; mol_type = other DNA
agtgcaagcacaaacggacga

SEQ ID NO: 29768 - DNA, 21 bp, synthetic construct
  source 1..21: mol_type = other DNA; mol_type = other DNA
cttcatcgcttaggggaaggg

SEQ ID NO: 29769 - DNA, 21 bp, synthetic construct
  source 1..21: mol_type = other DNA; mol_type = other DNA
cgggacggtagtagcacctgg

SEQ ID NO: 29770 - DNA, 21 bp, synthetic construct
  source 1..21: mol_type = other DNA; mol_type = other DNA
tacgccagggggagccctaac

SEQ ID NO: 29771 - DNA, 21 bp, synthetic construct
  source 1..21: mol_type = other DNA; mol_type = other DNA
tatacaaagtcgggacccagc

SEQ ID NO: 29772 - DNA, 21 bp, synthetic construct
  source 1..21: mol_type = other DNA; mol_type = other DNA
gacatggcaagtcgtatgtgg

SEQ ID NO: 29773 - DNA, 21 bp, synthetic construct
  source 1..21: mol_type = other DNA; mol_type = other DNA
cgactcccggatgtgtacccc

SEQ ID NO: 29774 - DNA, 21 bp, synthetic construct
  source 1..21: mol_type = other DNA; mol_type = other DNA
ggtgatggacaaagccgttgg

SEQ ID NO: 29775 - DNA, 21 bp, synthetic construct
  source 1..21: mol_type = other DNA; mol_type = other DNA
tatagcaggacaggttccaac

SEQ ID NO: 29776 - DNA, 21 bp, synthetic construct
  source 1..21: mol_type = other DNA; mol_type = other DNA
caccacaagctgcagacgttg

SEQ ID NO: 29777 - DNA, 21 bp, synthetic construct
  source 1..21: mol_type = other DNA; mol_type = other DNA
tacagtaagtactgtgtcaac

SEQ ID NO: 29778 - DNA, 21 bp, synthetic construct
  source 1..21: mol_type = other DNA; mol_type = other DNA
agcatgcaggatcgaaaatgg

SEQ ID NO: 29779 - DNA, 21 bp, synthetic construct
  source 1..21: mol_type = other DNA; mol_type = other DNA
cgaacctatgacgtctacccg

SEQ ID NO: 29780 - DNA, 21 bp, synthetic construct
  source 1..21: mol_type = other DNA; mol_type = other DNA
agggagggtacatcgtattgg

SEQ ID NO: 29781 - DNA, 21 bp, synthetic construct
  source 1..21: mol_type = other DNA; mol_type = other DNA
ttttgggcgggcgtgaaggac

SEQ ID NO: 29782 - DNA, 21 bp, synthetic construct
  source 1..21: mol_type = other DNA; mol_type = other DNA
tacgctaaggggaacgcgaac

SEQ ID NO: 29783 - DNA, 21 bp, synthetic construct
  source 1..21: mol_type = other DNA; mol_type = other DNA
tatgtaagatttgacgctaat

SEQ ID NO: 29784 - DNA, 21 bp, synthetic construct
  source 1..21: mol_type = other DNA; mol_type = other DNA
tattcacgcttaaacggaaat

SEQ ID NO: 29785 - DNA, 21 bp, synthetic construct
  source 1..21: mol_type = other DNA; mol_type = other DNA
ttttctcgactcggatcgaac

SEQ ID NO: 29786 - DNA, 21 bp, synthetic construct
  source 1..21: mol_type = other DNA; mol_type = other DNA
tgcatgagcggccctcgtccc

SEQ ID NO: 29787 - DNA, 21 bp, synthetic construct
  source 1..21: mol_type = other DNA; mol_type = other DNA
tatgcgcgaagcggttacaat

SEQ ID NO: 29788 - DNA, 21 bp, synthetic construct
  source 1..21: mol_type = other DNA; mol_type = other DNA
tattcgcgcattgcgccaaac

SEQ ID NO: 29789 - DNA, 21 bp, synthetic construct
  source 1..21: mol_type = other DNA; mol_type = other DNA
atgctttcagacagattatgg

SEQ ID NO: 29790 - DNA, 21 bp, synthetic construct
  source 1..21: mol_type = other DNA; mol_type = other DNA
tacttcagcggacgcacaagc

SEQ ID NO: 29791 - DNA, 21 bp, synthetic construct
  source 1..21: mol_type = other DNA; mol_type = other DNA
agagaagacatggtaagttgg

SEQ ID NO: 29792 - DNA, 21 bp, synthetic construct
  source 1..21: mol_type = other DNA; mol_type = other DNA
tacttttctggacagacaagt

SEQ ID NO: 29793 - DNA, 21 bp, synthetic construct
  source 1..21: mol_type = other DNA; mol_type = other DNA
cgcaccagggaagtataccca

SEQ ID NO: 29794 - DNA, 21 bp, synthetic construct
  source 1..21: mol_type = other DNA; mol_type = other DNA
ttctggagcggggtaacggag

SEQ ID NO: 29795 - DNA, 21 bp, synthetic construct
  source 1..21: mol_type = other DNA; mol_type = other DNA
tacgctaggaacggccacaac

SEQ ID NO: 29796 - DNA, 21 bp, synthetic construct
  source 1..21: mol_type = other DNA; mol_type = other DNA
ttagcgagatcggggtgggac

SEQ ID NO: 29797 - DNA, 21 bp, synthetic construct
  source 1..21: mol_type = other DNA; mol_type = other DNA
tactccgcaaggggacctaac

SEQ ID NO: 29798 - DNA, 21 bp, synthetic construct
  source 1..21: mol_type = other DNA; mol_type = other DNA
tacgctaggcaaggcatgaat

SEQ ID NO: 29799 - DNA, 21 bp, synthetic construct
  source 1..21: mol_type = other DNA; mol_type = other DNA
tacgtacgttcagatgttcgt

SEQ ID NO: 29800 - DNA, 21 bp, synthetic construct
  source 1..21: mol_type = other DNA; mol_type = other DNA
tatttctctggtcggagcgat

SEQ ID NO: 29801 - DNA, 21 bp, synthetic construct
  source 1..21: mol_type = other DNA; mol_type = other DNA
ccagtccctgactgtctggcg

SEQ ID NO: 29802 - DNA, 21 bp, synthetic construct
  source 1..21: mol_type = other DNA; mol_type = other DNA
tacagtcgtattggtaataat

SEQ ID NO: 29803 - DNA, 21 bp, synthetic construct
  source 1..21: mol_type = other DNA; mol_type = other DNA
tatgctaagggcgggtgcaac

SEQ ID NO: 29804 - DNA, 21 bp, synthetic construct
  source 1..21: mol_type = other DNA; mol_type = other DNA
actggtagcacaaatggaata

SEQ ID NO: 29805 - DNA, 21 bp, synthetic construct
  source 1..21: mol_type = other DNA; mol_type = other DNA
ccctacgctagatcgcctgag

SEQ ID NO: 29806 - DNA, 21 bp, synthetic construct
  source 1..21: mol_type = other DNA; mol_type = other DNA
tgtcggccccccaccagagat

SEQ ID NO: 29807 - DNA, 21 bp, synthetic construct
  source 1..21: mol_type = other DNA; mol_type = other DNA
ccgtatgccaagagtgcaaac

SEQ ID NO: 29808 - DNA, 21 bp, synthetic construct
  source 1..21: mol_type = other DNA; mol_type = other DNA
atgacgtatgacagttacgac

SEQ ID NO: 29809 - DNA, 21 bp, synthetic construct
  source 1..21: mol_type = other DNA; mol_type = other DNA
tgccaaagcaagacggggcat

SEQ ID NO: 29810 - DNA, 21 bp, synthetic construct
  source 1..21: mol_type = other DNA; mol_type = other DNA
tatagccgaatcgggtccaac

SEQ ID NO: 29811 - DNA, 21 bp, synthetic construct
  source 1..21: mol_type = other DNA; mol_type = other DNA
tatagcaaacataacgctaac

SEQ ID NO: 29812 - DNA, 21 bp, synthetic construct
  source 1..21: mol_type = other DNA; mol_type = other DNA
ttctcccgtcaagggcccaat

SEQ ID NO: 29813 - DNA, 21 bp, synthetic construct
  source 1..21: mol_type = other DNA; mol_type = other DNA
tactcacgcacaggcagtaat

SEQ ID NO: 29814 - DNA, 21 bp, synthetic construct
  source 1..21: mol_type = other DNA; mol_type = other DNA
tacgccagaacaggatgggac

SEQ ID NO: 29815 - DNA, 21 bp, synthetic construct
  source 1..21: mol_type = other DNA; mol_type = other DNA
atacctcgtacctgcccagct

SEQ ID NO: 29816 - DNA, 21 bp, synthetic construct
  source 1..21: mol_type = other DNA; mol_type = other DNA
tattggagtggaactatggca

SEQ ID NO: 29817 - DNA, 21 bp, synthetic construct
  source 1..21: mol_type = other DNA; mol_type = other DNA
tatcatcgcctgtcggataac

SEQ ID NO: 29818 - DNA, 21 bp, synthetic construct
  source 1..21: mol_type = other DNA; mol_type = other DNA
gtttgtagaccgtgcgcagga

SEQ ID NO: 29819 - DNA, 21 bp, synthetic construct
  source 1..21: mol_type = other DNA; mol_type = other DNA
tacgtgagaagctgcccgatg

SEQ ID NO: 29820 - DNA, 21 bp, synthetic construct
  source 1..21: mol_type = other DNA; mol_type = other DNA
attgacgaatggaagacttgg

SEQ ID NO: 29821 - DNA, 21 bp, synthetic construct
  source 1..21: mol_type = other DNA; mol_type = other DNA
ggagacgaatccagcgtctgg

SEQ ID NO: 29822 - DNA, 21 bp, synthetic construct
  source 1..21: mol_type = other DNA; mol_type = other DNA
tattggactgggaagccggac

SEQ ID NO: 29823 - DNA, 21 bp, synthetic construct
  source 1..21: mol_type = other DNA; mol_type = other DNA
tatttctcgggcactcgtgca

SEQ ID NO: 29824 - DNA, 21 bp, synthetic construct
  source 1..21: mol_type = other DNA; mol_type = other DNA
tacagtaaacatggttacaat

SEQ ID NO: 29825 - DNA, 21 bp, synthetic construct
  source 1..21: mol_type = other DNA; mol_type = other DNA
ttggcaaagaatgggcataac

SEQ ID NO: 29826 - DNA, 21 bp, synthetic construct
  source 1..21: mol_type = other DNA; mol_type = other DNA
caccatagcacgaatggcatt

SEQ ID NO: 29827 - DNA, 21 bp, synthetic construct
  source 1..21: mol_type = other DNA; mol_type = other DNA
tactcgagaatcgggatgaat

SEQ ID NO: 29828 - DNA, 21 bp, synthetic construct
  source 1..21: mol_type = other DNA; mol_type = other DNA
tatttcgcaggtaagtatgac

SEQ ID NO: 29829 - DNA, 21 bp, synthetic construct
  source 1..21: mol_type = other DNA; mol_type = other DNA
actcctgatagcgtacgatgg

SEQ ID NO: 29830 - DNA, 21 bp, synthetic construct
  source 1..21: mol_type = other DNA; mol_type = other DNA
tggtggtcaggaatggtcgag

SEQ ID NO: 29831 - DNA, 21 bp, synthetic construct
  source 1..21: mol_type = other DNA; mol_type = other DNA
gtagtggactacatgagtcat

SEQ ID NO: 29832 - DNA, 21 bp, synthetic construct
  source 1..21: mol_type = other DNA; mol_type = other DNA
tactacactgggaaagtttcc

SEQ ID NO: 29833 - DNA, 21 bp, synthetic construct
  source 1..21: mol_type = other DNA; mol_type = other DNA
ggcggggacgggagcagttgg

SEQ ID NO: 29834 - DNA, 21 bp, synthetic construct
  source 1..21: mol_type = other DNA; mol_type = other DNA
atgacgggtataagctgctta

SEQ ID NO: 29835 - DNA, 21 bp, synthetic construct
  source 1..21: mol_type = other DNA; mol_type = other DNA
ataatgtccactaatggtgtt

SEQ ID NO: 29836 - DNA, 21 bp, synthetic construct
  source 1..21: mol_type = other DNA; mol_type = other DNA
ttttcacgaacaggtgcaaat

SEQ ID NO: 29837 - DNA, 21 bp, synthetic construct
  source 1..21: mol_type = other DNA; mol_type = other DNA
agtatgatggaccggagttgg

SEQ ID NO: 29838 - DNA, 21 bp, synthetic construct
  source 1..21: mol_type = other DNA; mol_type = other DNA
gatttgaagagcgcgaattgg

SEQ ID NO: 29839 - DNA, 21 bp, synthetic construct
  source 1..21: mol_type = other DNA; mol_type = other DNA
tacttcgctgggaagcacgaa

SEQ ID NO: 29840 - DNA, 21 bp, synthetic construct
  source 1..21: mol_type = other DNA; mol_type = other DNA
gggaaattgggttcttgtgat

SEQ ID NO: 29841 - DNA, 21 bp, synthetic construct
  source 1..21: mol_type = other DNA; mol_type = other DNA
agagatggcgcttccggctgg

SEQ ID NO: 29842 - DNA, 21 bp, synthetic construct
  source 1..21: mol_type = other DNA; mol_type = other DNA
atagcatccaggtgccctcac

SEQ ID NO: 29843 - DNA, 21 bp, synthetic construct
  source 1..21: mol_type = other DNA; mol_type = other DNA
tatttcactggaacgaataat

SEQ ID NO: 29844 - DNA, 21 bp, synthetic construct
  source 1..21: mol_type = other DNA; mol_type = other DNA
tattacaccggtgtcgtggca

SEQ ID NO: 29845 - DNA, 21 bp, synthetic construct
  source 1..21: mol_type = other DNA
ggagtagagcatgtccgctgg

SEQ ID NO: 29846 - DNA, 21 bp, synthetic construct
  source 1..21: mol_type = other DNA; mol_type = other DNA
tattttcatggtagagtggat

SEQ ID NO: 29847 - DNA, 21 bp, synthetic construct
  source 1..21: mol_type = other DNA; mol_type = other DNA
tattggacaggcatgactagt

SEQ ID NO: 29848 - DNA, 21 bp, synthetic construct
  source 1..21: mol_type = other DNA; mol_type = other DNA
ctattggctgaccggacttgg

SEQ ID NO: 29849 - DNA, 21 bp, synthetic construct
  source 1..21: mol_type = other DNA; mol_type = other DNA
tatttctctggagtgcgcaac

SEQ ID NO: 29850 - DNA, 21 bp, synthetic construct
  source 1..21: mol_type = other DNA; mol_type = other DNA
tacttcacaggacgagaagac

SEQ ID NO: 29851 - DNA, 21 bp, synthetic construct
  source 1..21: mol_type = other DNA; mol_type = other DNA
ttatcccggagctcaatgaac

SEQ ID NO: 29852 - DNA, 21 bp, synthetic construct
  source 1..21: mol_type = other DNA; mol_type = other DNA
tatagctcaacccatggcgta

SEQ ID NO: 29853 - DNA, 21 bp, synthetic construct
  source 1..21: mol_type = other DNA; mol_type = other DNA
ggcggagcttcctccaggtgg

SEQ ID NO: 29854 - DNA, 21 bp, synthetic construct
  source 1..21: mol_type = other DNA; mol_type = other DNA
attatgtcggaaagagtttgg

SEQ ID NO: 29855 - DNA, 21 bp, synthetic construct
  source 1..21: mol_type = other DNA; mol_type = other DNA
tactttagtggaacccatcaa

SEQ ID NO: 29856 - DNA, 21 bp, synthetic construct
  source 1..21: mol_type = other DNA; mol_type = other DNA
tactggaccggtatgcaggac

SEQ ID NO: 29857 - DNA, 21 bp, synthetic construct
  source 1..21: mol_type = other DNA; mol_type = other DNA
ttttctaggaccggtcacaat

SEQ ID NO: 29858 - DNA, 21 bp, synthetic construct
  source 1..21: mol_type = other DNA; mol_type = other DNA
attatgagcagccgaagctgg

SEQ ID NO: 29859 - DNA, 21 bp, synthetic construct
  source 1..21: mol_type = other DNA; mol_type = other DNA
tttagcagagtccagcctaac

SEQ ID NO: 29860 - DNA, 21 bp, synthetic construct
  source 1..21: mol_type = other DNA; mol_type = other DNA
aataaatcatgctcatcaatg

SEQ ID NO: 29861 - DNA, 21 bp, synthetic construct
  source 1..21: mol_type = other DNA; mol_type = other DNA
aggtctattgacgcatttccc

SEQ ID NO: 29862 - DNA, 21 bp, synthetic construct
  source 1..21: mol_type = other DNA; mol_type = other DNA
taccataggctcgatcctaac

SEQ ID NO: 29863 - DNA, 21 bp, synthetic construct
  source 1..21: mol_type = other DNA; mol_type = other DNA
ctctctgccttgagtgttaat

SEQ ID NO: 29864 - DNA, 21 bp, synthetic construct
  source 1..21: mol_type = other DNA; mol_type = other DNA
tatttccatggtaaacaagat

SEQ ID NO: 29865 - DNA, 21 bp, synthetic construct
  source 1..21: mol_type = other DNA; mol_type = other DNA
taccatcgcttgcaatcggtc

SEQ ID NO: 29866 - DNA, 21 bp, synthetic construct
  source 1..21: mol_type = other DNA; mol_type = other DNA
tattacaccggtcgcgtcgat

SEQ ID NO: 29867 - DNA, 21 bp, synthetic construct
  source 1..21: mol_type = other DNA; mol_type = other DNA
ggcgatggaaatagcagatgg

SEQ ID NO: 29868 - DNA, 21 bp, synthetic construct
  source 1..21: mol_type = other DNA; mol_type = other DNA
ggagaggttaatgtcagatgg

SEQ ID NO: 29869 - DNA, 21 bp, synthetic construct
  source 1..21: mol_type = other DNA; mol_type = other DNA
tactatactggagttctagag

SEQ ID NO: 29870 - DNA, 21 bp, synthetic construct
  source 1..21: mol_type = other DNA; mol_type = other DNA
agtatgcaggacaggctctgg

SEQ ID NO: 29871 - DNA, 21 bp, synthetic construct
  source 1..21: mol_type = other DNA; mol_type = other DNA
tatagtcgggtcggcaataat

SEQ ID NO: 29872 - DNA, 21 bp, synthetic construct
  source 1..21: mol_type = other DNA; mol_type = other DNA
attgacagcactaatggcata

SEQ ID NO: 29873 - DNA, 21 bp, synthetic construct
  source 1..21: mol_type = other DNA; mol_type = other DNA
cgcaatggcacttcagcatgg

SEQ ID NO: 29874 - DNA, 21 bp, synthetic construct
  source 1..21: mol_type = other DNA; mol_type = other DNA
tacagtgcgaatggtcccaat

SEQ ID NO: 29875 - DNA, 21 bp, synthetic construct
  source 1..21: mol_type = other DNA; mol_type = other DNA
tatgctcggaccgggcacaac

SEQ ID NO: 29876 - DNA, 21 bp, synthetic construct
  source 1..21: mol_type = other DNA; mol_type = other DNA
atttcaaagacgtgtgggagc

SEQ ID NO: 29877 - DNA, 21 bp, synthetic construct
  source 1..21: mol_type = other DNA; mol_type = other DNA
tacgctcgaagcggacataat

SEQ ID NO: 29878 - DNA, 21 bp, synthetic construct
  source 1..21: mol_type = other DNA; mol_type = other DNA
tattttactggggtggccaca

SEQ ID NO: 29879 - DNA, 21 bp, synthetic construct
  source 1..21: mol_type = other DNA; mol_type = other DNA
tgcaaaccactccagcctgcc

SEQ ID NO: 29880 - DNA, 21 bp, synthetic construct
  source 1..21: mol_type = other DNA; mol_type = other DNA
gttcacagttttaatggagta

SEQ ID NO: 29881 - DNA, 21 bp, synthetic construct
  source 1..21: mol_type = other DNA; mol_type = other DNA
tgtaagccgcccccaaaaata

SEQ ID NO: 29882 - DNA, 21 bp, synthetic construct
  source 1..21: mol_type = other DNA; mol_type = other DNA
tattacacgggtgttatggcc

SEQ ID NO: 29883 - DNA, 21 bp, synthetic construct
  source 1..21: mol_type = other DNA; mol_type = other DNA
tacagtagagttgggattaat

SEQ ID NO: 29884 - DNA, 21 bp, synthetic construct
  source 1..21: mol_type = other DNA; mol_type = other DNA
agctcgtcttccaacggtgtc

SEQ ID NO: 29885 - DNA, 21 bp, synthetic construct
  source 1..21: mol_type = other DNA; mol_type = other DNA
ttcagcaggcttaacacaaac

SEQ ID NO: 29886 - DNA, 21 bp, synthetic construct
  source 1..21: mol_type = other DNA; mol_type = other DNA
tacatgaaagacgcatttccc

SEQ ID NO: 29887 - DNA, 21 bp, synthetic construct
  source 1..21: mol_type = other DNA; mol_type = other DNA
tttttctccgggcgtgtcgag

SEQ ID NO: 29888 - DNA, 21 bp, synthetic construct
  source 1..21: mol_type = other DNA; mol_type = other DNA
catgggtcaacgaatggcaag

SEQ ID NO: 29889 - DNA, 21 bp, synthetic construct
  source 1..21: mol_type = other DNA; mol_type = other DNA
atatgcaagccctgtttgact

SEQ ID NO: 29890 - DNA, 21 bp, synthetic construct
  source 1..21: mol_type = other DNA; mol_type = other DNA
ttggccaagaccgggacgaat

SEQ ID NO: 29891 - DNA, 21 bp, synthetic construct
  source 1..21: mol_type = other DNA; mol_type = other DNA
gggcctgagacggtccgctgg

SEQ ID NO: 29892 - DNA, 21 bp, synthetic construct
  source 1..21: mol_type = other DNA; mol_type = other DNA
cgtgcctttgactcttaccca

SEQ ID NO: 29893 - DNA, 21 bp, synthetic construct
  source 1..21: mol_type = other DNA; mol_type = other DNA
agggattccacacacggtgtc

SEQ ID NO: 29894 - DNA, 21 bp, synthetic construct
  source 1..21: mol_type = other DNA; mol_type = other DNA
tatttcaccggaacgtcatct

SEQ ID NO: 29895 - DNA, 21 bp, synthetic construct
  source 1..21: mol_type = other DNA; mol_type = other DNA
tgtgttcaaaccaagaaagaa

SEQ ID NO: 29896 - DNA, 21 bp, synthetic construct
  source 1..21: mol_type = other DNA; mol_type = other DNA
tttttcagcggggtaaccgca

SEQ ID NO: 29897 - DNA, 21 bp, synthetic construct
  source 1..21: mol_type = other DNA; mol_type = other DNA
tatagcaaaatcaacttcaat

SEQ ID NO: 29898 - DNA, 21 bp, synthetic construct
  source 1..21: mol_type = other DNA; mol_type = other DNA
tactcccggattggtcataat

SEQ ID NO: 29899 - DNA, 21 bp, synthetic construct
  source 1..21: mol_type = other DNA; mol_type = other DNA
tactggagtgggaaagtggct

SEQ ID NO: 29900 - DNA, 21 bp, synthetic construct
  source 1..21: mol_type = other DNA; mol_type = other DNA
tacttctcaaaggtgcaggcc

SEQ ID NO: 29901 - DNA, 21 bp, synthetic construct
  source 1..21: mol_type = other DNA; mol_type = other DNA
tatgcacggaccaacacgaac

SEQ ID NO: 29902 - DNA, 21 bp, synthetic construct
  source 1..21: mol_type = other DNA; mol_type = other DNA
tatttttccggcagaccgaac

SEQ ID NO: 29903 - DNA, 21 bp, synthetic construct
  source 1..21: mol_type = other DNA; mol_type = other DNA
cccatgcaggatagatcttgg

SEQ ID NO: 29904 - DNA, 21 bp, synthetic construct
  source 1..21: mol_type = other DNA; mol_type = other DNA
tatgagaccggttgtaaggaa

SEQ ID NO: 29905 - DNA, 21 bp, synthetic construct
  source 1..21: mol_type = other DNA; mol_type = other DNA
tatagtaaacatgggtttaac

SEQ ID NO: 29906 - DNA, 21 bp, synthetic construct
  source 1..21: mol_type = other DNA; mol_type = other DNA
ggagacgaatggaagacgtgg

SEQ ID NO: 29907 - DNA, 21 bp, synthetic construct
  source 1..21: mol_type = other DNA; mol_type = other DNA
tactcgagggtcagtgacaca

SEQ ID NO: 29908 - DNA, 21 bp, synthetic construct
  source 1..21: mol_type = other DNA; mol_type = other DNA
ctagcgcgcaatgcttctaat

SEQ ID NO: 29909 - DNA, 21 bp, synthetic construct
  source 1..21: mol_type = other DNA; mol_type = other DNA
gactatactggtaaatctgcc

SEQ ID NO: 29910 - DNA, 21 bp, synthetic construct
  source 1..21: mol_type = other DNA; mol_type = other DNA
atcttggatagtagaaagtgg

SEQ ID NO: 29911 - DNA, 21 bp, synthetic construct
  source 1..21: mol_type = other DNA; mol_type = other DNA
cttgatgattggactacttac

SEQ ID NO: 29912 - DNA, 21 bp, synthetic construct
  source 1..21: mol_type = other DNA; mol_type = other DNA
tactgtaaatcacagtcatat

SEQ ID NO: 29913 - DNA, 21 bp, synthetic construct
  source 1..21: mol_type = other DNA; mol_type = other DNA
tattttcacggtactgttgag

SEQ ID NO: 29914 - DNA, 21 bp, synthetic construct
  source 1..21: mol_type = other DNA; mol_type = other DNA
taccacgccaggagtccttta

SEQ ID NO: 29915 - DNA, 21 bp, synthetic construct
  source 1..21: mol_type = other DNA; mol_type = other DNA
gtcagtgactttatggccttc

SEQ ID NO: 29916 - DNA, 21 bp, synthetic construct
  source 1..21: mol_type = other DNA; mol_type = other DNA
tatcatataaagtcatgcgac

SEQ ID NO: 29917 - DNA, 21 bp, synthetic construct
  source 1..21: mol_type = other DNA; mol_type = other DNA
catcgtagtacaaacggcgta

SEQ ID NO: 29918 - DNA, 21 bp, synthetic construct
  source 1..21: mol_type = other DNA; mol_type = other DNA
tatgccaaaaatggtgtgaat

SEQ ID NO: 29919 - DNA, 21 bp, synthetic construct
  source 1..21: mol_type = other DNA; mol_type = other DNA
attatgagcacaaatggtgtt

SEQ ID NO: 29920 - DNA, 21 bp, synthetic construct
  source 1..21: mol_type = other DNA; mol_type = other DNA
attatggaatcacagagctgg

SEQ ID NO: 29921 - DNA, 21 bp, synthetic construct
  source 1..21: mol_type = other DNA; mol_type = other DNA
tattggagtggcgtccaagtt

SEQ ID NO: 29922 - DNA, 21 bp, synthetic construct
  source 1..21: mol_type = other DNA; mol_type = other DNA
tactggtcgggcatccagttg

SEQ ID NO: 29923 - DNA, 21 bp, synthetic construct
  source 1..21: mol_type = other DNA; mol_type = other DNA
atgtgggacgggactagccca

SEQ ID NO: 29924 - DNA, 21 bp, synthetic construct
  source 1..21: mol_type = other DNA; mol_type = other DNA
caaactagtactaatggcagg

SEQ ID NO: 29925 - DNA, 21 bp, synthetic construct
  source 1..21: mol_type = other DNA; mol_type = other DNA
ttttttagtggagtccgcgat

SEQ ID NO: 29926 - DNA, 21 bp, synthetic construct
  source 1..21: mol_type = other DNA; mol_type = other DNA
tacagccgtatgaaccctaac

SEQ ID NO: 29927 - DNA, 21 bp, synthetic construct
  source 1..21: mol_type = other DNA; mol_type = other DNA
atgctgtctgatcgaacttgg

SEQ ID NO: 29928 - DNA, 21 bp, synthetic construct
  source 1..21: mol_type = other DNA; mol_type = other DNA
tatagtcgtatgggtatcaac

SEQ ID NO: 29929 - DNA, 21 bp, synthetic construct
  source 1..21: mol_type = other DNA; mol_type = other DNA
tggactcaggcgtgtccgaaa

SEQ ID NO: 29930 - DNA, 21 bp, synthetic construct
  source 1..21: mol_type = other DNA; mol_type = other DNA
tactttagtgggcagtcggag

SEQ ID NO: 29931 - DNA, 21 bp, synthetic construct
  source 1..21: mol_type = other DNA; mol_type = other DNA
ttgtcacgcgtagcttttgat

SEQ ID NO: 29932 - DNA, 21 bp, synthetic construct
  source 1..21: mol_type = other DNA; mol_type = other DNA
ttccaaagcacgaatggggta

SEQ ID NO: 29933 - DNA, 21 bp, synthetic construct
  source 1..21: mol_type = other DNA; mol_type = other DNA
tattttacaggaagaaacgat

SEQ ID NO: 29934 - DNA, 21 bp, synthetic construct
  source 1..21: mol_type = other DNA; mol_type = other DNA
gaacgaaaagtgcatccacaa

SEQ ID NO: 29935 - DNA, 21 bp, synthetic construct
  source 1..21: mol_type = other DNA; mol_type = other DNA
ttacacaggctcggagagggc

SEQ ID NO: 29936 - DNA, 21 bp, synthetic construct
  source 1..21: mol_type = other DNA; mol_type = other DNA
tacgtacgctcacaaccccac

SEQ ID NO: 29937 - DNA, 21 bp, synthetic construct
  source 1..21: mol_type = other DNA; mol_type = other DNA
tactcgaaatggaatgtcaat

SEQ ID NO: 29938 - DNA, 21 bp, synthetic construct
  source 1..21: mol_type = other DNA; mol_type = other DNA
tacagcaaagcaaattgcaat

SEQ ID NO: 29939 - DNA, 21 bp, synthetic construct
  source 1..21: mol_type = other DNA; mol_type = other DNA
aatggaccgcatgggtggaat

SEQ ID NO: 29940 - DNA, 21 bp, synthetic construct
  source 1..21: mol_type = other DNA; mol_type = other DNA
tactttacggggacgcacact

SEQ ID NO: 29941 - DNA, 21 bp, synthetic construct
  source 1..21: mol_type = other DNA; mol_type = other DNA
tcagctcaaacctgcaagccc

SEQ ID NO: 29942 - DNA, 21 bp, synthetic construct
  source 1..21: mol_type = other DNA; mol_type = other DNA
cgggacggttcgtctacttgg

SEQ ID NO: 29943 - DNA, 21 bp, synthetic construct
  source 1..21: mol_type = other DNA; mol_type = other DNA
tattgggcaggtataaccgaa

SEQ ID NO: 29944 - DNA, 21 bp, synthetic construct
  source 1..21: mol_type = other DNA; mol_type = other DNA
tacagcagactaaatcaaaat

SEQ ID NO: 29945 - DNA, 21 bp, synthetic construct
  source 1..21: mol_type = other DNA; mol_type = other DNA
tgtaaggaggaaaagaaggag

SEQ ID NO: 29946 - DNA, 21 bp, synthetic construct
  source 1..21: mol_type = other DNA; mol_type = other DNA
tactactcgggagtcatggct

SEQ ID NO: 29947 - DNA, 21 bp, synthetic construct
  source 1..21: mol_type = other DNA; mol_type = other DNA
atcccgtgtaagccatgtggt

SEQ ID NO: 29948 - DNA, 21 bp, synthetic construct
  source 1..21: mol_type = other DNA; mol_type = other DNA
actcaaattgctccagactgt

SEQ ID NO: 29949 - DNA, 21 bp, synthetic construct
  source 1..21: mol_type = other DNA; mol_type = other DNA
gtcctctcaagcaatatttgg

SEQ ID NO: 29950 - DNA, 21 bp, synthetic construct
  source 1..21: mol_type = other DNA; mol_type = other DNA
tacattaagtcggattatcag

SEQ ID NO: 29951 - DNA, 21 bp, synthetic construct
  source 1..21: mol_type = other DNA; mol_type = other DNA
tacttcactggcgtaacacat

SEQ ID NO: 29952 - DNA, 21 bp, synthetic construct
  source 1..21: mol_type = other DNA; mol_type = other DNA
aaatacgcgtttagtagcgag

SEQ ID NO: 29953 - DNA, 21 bp, synthetic construct
  source 1..21: mol_type = other DNA; mol_type = other DNA
attatgggcgacagaaagtgg

SEQ ID NO: 29954 - DNA, 21 bp, synthetic construct
  source 1..21: mol_type = other DNA; mol_type = other DNA
tactggtccgggacgatggct

SEQ ID NO: 29955 - DNA, 21 bp, synthetic construct
  source 1..21: mol_type = other DNA; mol_type = other DNA
gcatgtaagccgcagatggga

SEQ ID NO: 29956 - DNA, 21 bp, synthetic construct
  source 1..21: mol_type = other DNA; mol_type = other DNA
tacgcaagagatgggcctaat

SEQ ID NO: 29957 - DNA, 21 bp, synthetic construct
  source 1..21: mol_type = other DNA; mol_type = other DNA
tatagccgtataggaatgaac

SEQ ID NO: 29958 - DNA, 21 bp, synthetic construct
  source 1..21: mol_type = other DNA; mol_type = other DNA
tggtggcacggcataccggaa

SEQ ID NO: 29959 - DNA, 21 bp, synthetic construct
  source 1..21: mol_type = other DNA; mol_type = other DNA
cgaggacatgagggctacttc

SEQ ID NO: 29960 - DNA, 21 bp, synthetic construct
  source 1..21: mol_type = other DNA; mol_type = other DNA
cgcgacaacactgtttacccg

SEQ ID NO: 29961 - DNA, 21 bp, synthetic construct
  source 1..21: mol_type = other DNA; mol_type = other DNA
tactacagcggtgtcaaattg

SEQ ID NO: 29962 - DNA, 21 bp, synthetic construct
  source 1..21: mol_type = other DNA; mol_type = other DNA
tcggatgagtacagtacgtat

SEQ ID NO: 29963 - DNA, 21 bp, synthetic construct
  source 1..21: mol_type = other DNA
taccacaaaggcgggtgcgaa

SEQ ID NO: 29964 - DNA, 21 bp, synthetic construct
  source 1..21: mol_type = other DNA; mol_type = other DNA
ggtatggcggatagagcgtgg

SEQ ID NO: 29965 - DNA, 21 bp, synthetic construct
  source 1..21: mol_type = other DNA; mol_type = other DNA
cgggatagtacacatggcatt

SEQ ID NO: 29966 - DNA, 21 bp, synthetic construct
  source 1..21: mol_type = other DNA; mol_type = other DNA
tcactggaatcacgcgactgg

SEQ ID NO: 29967 - DNA, 21 bp, synthetic construct
  source 1..21: mol_type = other DNA; mol_type = other DNA
ggtggttctaccagtacatgg

SEQ ID NO: 29968 - DNA, 21 bp, synthetic construct
  source 1..21: mol_type = other DNA; mol_type = other DNA
tgcggcggggggaagcccccc

SEQ ID NO: 29969 - DNA, 21 bp, synthetic construct
  source 1..21: mol_type = other DNA; mol_type = other DNA
tatgttaagagtcaaccgcaa

SEQ ID NO: 29970 - DNA, 21 bp, synthetic construct
  source 1..21: mol_type = other DNA; mol_type = other DNA
tacagtcgtacaggtttaaat

SEQ ID NO: 29971 - DNA, 21 bp, synthetic construct
  source 1..21: mol_type = other DNA; mol_type = other DNA
cagtcaccgggctgtaaggac

SEQ ID NO: 29972 - DNA, 21 bp, synthetic construct
  source 1..21: mol_type = other DNA; mol_type = other DNA
ttcttttccggcgtaagggat

SEQ ID NO: 29973 - DNA, 21 bp, synthetic construct
  source 1..21: mol_type = other DNA; mol_type = other DNA
tatagcaaaaacggtaataac

SEQ ID NO: 29974 - DNA, 21 bp, synthetic construct
  source 1..21: mol_type = other DNA; mol_type = other DNA
agtgaatcgacaaatggcatc

SEQ ID NO: 29975 - DNA, 21 bp, synthetic construct
  source 1..21: mol_type = other DNA; mol_type = other DNA
tatttcagtggtcgtcaagac

SEQ ID NO: 29976 - DNA, 21 bp, synthetic construct
  source 1..21: mol_type = other DNA; mol_type = other DNA
tgtatgaagacccctgaacgt

SEQ ID NO: 29977 - DNA, 21 bp, synthetic construct
  source 1..21: mol_type = other DNA; mol_type = other DNA
tattcgcgcattggacagaat

SEQ ID NO: 29978 - DNA, 21 bp, synthetic construct
  source 1..21: mol_type = other DNA; mol_type = other DNA
tttgattcgacgaatggacgc

SEQ ID NO: 29979 - DNA, 21 bp, synthetic construct
  source 1..21: mol_type = other DNA; mol_type = other DNA
ggcggcgccgggtctcattgg

SEQ ID NO: 29980 - DNA, 21 bp, synthetic construct
  source 1..21: mol_type = other DNA; mol_type = other DNA
tacagccgcatcggtaccaac

SEQ ID NO: 29981 - DNA, 21 bp, synthetic construct
  source 1..21: mol_type = other DNA; mol_type = other DNA
tattcaagactgcaagagaat

SEQ ID NO: 29982 - DNA, 21 bp, synthetic construct
  source 1..21: mol_type = other DNA; mol_type = other DNA
tgcggaaaattaaagccggag

SEQ ID NO: 29983 - DNA, 21 bp, synthetic construct
  source 1..21: mol_type = other DNA; mol_type = other DNA
tattacactgggcgcctagat

SEQ ID NO: 29984 - DNA, 21 bp, synthetic construct
  source 1..21: mol_type = other DNA; mol_type = other DNA
tgtaagcccgtccggggcgac

SEQ ID NO: 29985 - DNA, 21 bp, synthetic construct
  source 1..21: mol_type = other DNA; mol_type = other DNA
aacatgagctctcgaggctgg

SEQ ID NO: 29986 - DNA, 21 bp, synthetic construct
  source 1..21: mol_type = other DNA; mol_type = other DNA
tactcgagagctgggaataat

SEQ ID NO: 29987 - DNA, 21 bp, synthetic construct
  source 1..21: mol_type = other DNA; mol_type = other DNA
cacagccgtatgaacgagaat

SEQ ID NO: 29988 - DNA, 21 bp, synthetic construct
  source 1..21: mol_type = other DNA; mol_type = other DNA
tatgcgaggtctggccacaac

SEQ ID NO: 29989 - DNA, 21 bp, synthetic construct
  source 1..21: mol_type = other DNA; mol_type = other DNA
tggacccaagcatgccccaag

SEQ ID NO: 29990 - DNA, 21 bp, synthetic construct
  source 1..21: mol_type = other DNA; mol_type = other DNA
tgcaagccccagactccacag

SEQ ID NO: 29991 - DNA, 21 bp, synthetic construct
  source 1..21: mol_type = other DNA; mol_type = other DNA
tatagtaggctccatcaactg

SEQ ID NO: 29992 - DNA, 21 bp, synthetic construct
  source 1..21: mol_type = other DNA; mol_type = other DNA
tatgcgagagttggccataac

SEQ ID NO: 29993 - DNA, 21 bp, synthetic construct
  source 1..21: mol_type = other DNA; mol_type = other DNA
tgcacgaggatggactacggt

SEQ ID NO: 29994 - DNA, 21 bp, synthetic construct
  source 1..21: mol_type = other DNA; mol_type = other DNA
tacgctagacttggaatcaat

SEQ ID NO: 29995 - DNA, 21 bp, synthetic construct
  source 1..21: mol_type = other DNA; mol_type = other DNA
tatgccagaaatggggcgaat

SEQ ID NO: 29996 - DNA, 21 bp, synthetic construct
  source 1..21: mol_type = other DNA; mol_type = other DNA
tactccaggttgaacattaat

SEQ ID NO: 29997 - DNA, 21 bp, synthetic construct
  source 1..21: mol_type = other DNA; mol_type = other DNA
tggtggagcggcgttcaactt

SEQ ID NO: 29998 - DNA, 21 bp, synthetic construct
  source 1..21: mol_type = other DNA; mol_type = other DNA
tattcacgccttcagagcacg

SEQ ID NO: 29999 - DNA, 21 bp, synthetic construct
  source 1..21: mol_type = other DNA; mol_type = other DNA
tactggagcggaacgagagag

SEQ ID NO: 30000 - DNA, 21 bp, synthetic construct
  source 1..21: mol_type = other DNA; mol_type = other DNA
cgtacgtatgatacattccct

SEQ ID NO: 30001 - DNA, 21 bp, synthetic construct
  source 1..21: mol_type = other DNA; mol_type = other DNA
gatatggctacttcaacatgg

SEQ ID NO: 30002 - DNA, 21 bp, synthetic construct
  source 1..21: mol_type = other DNA; mol_type = other DNA
tactcgcggctcgggcacaac

SEQ ID NO: 30003 - DNA, 21 bp, synthetic construct
  source 1..21: mol_type = other DNA; mol_type = other DNA
tatcacaagttaaacctagtt

SEQ ID NO: 30004 - DNA, 21 bp, synthetic construct
  source 1..21: mol_type = other DNA; mol_type = other DNA
tactccaggaccggcctgaac

SEQ ID NO: 30005 - DNA, 21 bp, synthetic construct
  source 1..21: mol_type = other DNA; mol_type = other DNA
ggtggtggcgttgtcaggtgg

SEQ ID NO: 30006 - DNA, 21 bp, synthetic construct
  source 1..21: mol_type = other DNA; mol_type = other DNA
tattattcaggcatcgtcagc

SEQ ID NO: 30007 - DNA, 21 bp, synthetic construct
  source 1..21: mol_type = other DNA; mol_type = other DNA
tatcatgcgaaaagcccttgt

SEQ ID NO: 30008 - DNA, 21 bp, synthetic construct
  source 1..21: mol_type = other DNA; mol_type = other DNA
tactctcgcgccaactttaac

SEQ ID NO: 30009 - DNA, 21 bp, synthetic construct
  source 1..21: mol_type = other DNA; mol_type = other DNA
ttcagccgtcttaatccaaat

SEQ ID NO: 30010 - DNA, 21 bp, synthetic construct
  source 1..21: mol_type = other DNA; mol_type = other DNA
tggtggtctggagtacagttg

SEQ ID NO: 30011 - DNA, 21 bp, synthetic construct
  source 1..21: mol_type = other DNA; mol_type = other DNA
tgcaagtccgatcataagccg

SEQ ID NO: 30012 - DNA, 21 bp, synthetic construct
  source 1..21: mol_type = other DNA; mol_type = other DNA
tacagccgagctaatatcaac

SEQ ID NO: 30013 - DNA, 21 bp, synthetic construct
  source 1..21: mol_type = other DNA; mol_type = other DNA
ggtaacggcacaaagtgtggg

SEQ ID NO: 30014 - DNA, 21 bp, synthetic construct
  source 1..21: mol_type = other DNA; mol_type = other DNA
tatttcactggaacccataca

SEQ ID NO: 30015 - DNA, 21 bp, synthetic construct
  source 1..21: mol_type = other DNA; mol_type = other DNA
ttatgggatgggacaatgagc

SEQ ID NO: 30016 - DNA, 21 bp, synthetic construct
  source 1..21: mol_type = other DNA; mol_type = other DNA
tatagtagagtaaatgctaac

SEQ ID NO: 30017 - DNA, 21 bp, synthetic construct
  source 1..21: mol_type = other DNA; mol_type = other DNA
ggcgacgagtgggaaacctat

SEQ ID NO: 30018 - DNA, 21 bp, synthetic construct
  source 1..21: mol_type = other DNA; mol_type = other DNA
tacgcacgcacgaatcctaac

SEQ ID NO: 30019 - DNA, 21 bp, synthetic construct
  source 1..21: mol_type = other DNA; mol_type = other DNA
tatttcgccggtgttaaagac

SEQ ID NO: 30020 - DNA, 21 bp, synthetic construct
  source 1..21: mol_type = other DNA; mol_type = other DNA
tatttcagtggtactagggct

SEQ ID NO: 30021 - DNA, 21 bp, synthetic construct
  source 1..21: mol_type = other DNA; mol_type = other DNA
tacagtcgcatcggcggaaac

SEQ ID NO: 30022 - DNA, 21 bp, synthetic construct
  source 1..21: mol_type = other DNA; mol_type = other DNA
cgggaccagtttactagttac

SEQ ID NO: 30023 - DNA, 21 bp, synthetic construct
  source 1..21: mol_type = other DNA; mol_type = other DNA
tgtgttaagcccatgactgct

SEQ ID NO: 30024 - DNA, 21 bp, synthetic construct
  source 1..21: mol_type = other DNA; mol_type = other DNA
tattcaaaaatgggtacaaat

SEQ ID NO: 30025 - DNA, 21 bp, synthetic construct
  source 1..21: mol_type = other DNA; mol_type = other DNA
tgcaaacccgacgagtttggg

SEQ ID NO: 30026 - DNA, 21 bp, synthetic construct
  source 1..21: mol_type = other DNA; mol_type = other DNA
ggcagtcctggggcgcattgg

SEQ ID NO: 30027 - DNA, 21 bp, synthetic construct
  source 1..21: mol_type = other DNA; mol_type = other DNA
cggatgagtgcaagcaattgg

SEQ ID NO: 30028 - DNA, 21 bp, synthetic construct
  source 1..21: mol_type = other DNA; mol_type = other DNA
tgcagcccgtatctacatgag

SEQ ID NO: 30029 - DNA, 21 bp, synthetic construct
  source 1..21: mol_type = other DNA; mol_type = other DNA
tacagccgcattgggtacaat

SEQ ID NO: 30030 - DNA, 21 bp, synthetic construct
  source 1..21: mol_type = other DNA; mol_type = other DNA
tacagtcgactgggacctgtg

SEQ ID NO: 30031 - DNA, 21 bp, synthetic construct
  source 1..21: mol_type = other DNA; mol_type = other DNA
tatttcactggtacctggtca

SEQ ID NO: 30032 - DNA, 21 bp, synthetic construct
  source 1..21: mol_type = other DNA; mol_type = other DNA
tatcatcgcctgaacgattgg

SEQ ID NO: 30033 - DNA, 21 bp, synthetic construct
  source 1..21: mol_type = other DNA; mol_type = other DNA
tgcaaggagggaactcgcggt

SEQ ID NO: 30034 - DNA, 21 bp, synthetic construct
  source 1..21: mol_type = other DNA; mol_type = other DNA
tatgcccgttcaaacattaat

SEQ ID NO: 30035 - DNA, 21 bp, synthetic construct
  source 1..21: mol_type = other DNA; mol_type = other DNA
tacactcggctcagtatgaat

SEQ ID NO: 30036 - DNA, 21 bp, synthetic construct
  source 1..21: mol_type = other DNA; mol_type = other DNA
taccacgccaggcaagcaaat

SEQ ID NO: 30037 - DNA, 21 bp, synthetic construct
  source 1..21: mol_type = other DNA; mol_type = other DNA
gttgacgggtcgtgtaaagcc

SEQ ID NO: 30038 - DNA, 21 bp, synthetic construct
  source 1..21: mol_type = other DNA; mol_type = other DNA
agcggaagtacaaatgggatc

SEQ ID NO: 30039 - DNA, 21 bp, synthetic construct
  source 1..21: mol_type = other DNA; mol_type = other DNA
agagacgaattcaaagtatgg

SEQ ID NO: 30040 - DNA, 21 bp, synthetic construct
  source 1..21: mol_type = other DNA; mol_type = other DNA
tgcaaaaagtacggaggcgat

SEQ ID NO: 30041 - DNA, 21 bp, synthetic construct
  source 1..21: mol_type = other DNA; mol_type = other DNA
ggtggccccggggttcggtgg

SEQ ID NO: 30042 - DNA, 21 bp, synthetic construct
  source 1..21: mol_type = other DNA; mol_type = other DNA
attatgcttgatcgtggttgg

SEQ ID NO: 30043 - DNA, 21 bp, synthetic construct
  source 1..21: mol_type = other DNA; mol_type = other DNA
tattttactggccgatttgac

SEQ ID NO: 30044 - DNA, 21 bp, synthetic construct
  source 1..21: mol_type = other DNA; mol_type = other DNA
tacgtccgaagtggccctgat

SEQ ID NO: 30045 - DNA, 21 bp, synthetic construct
  source 1..21: mol_type = other DNA; mol_type = other DNA
gaccttgatagctataagtgg

SEQ ID NO: 30046 - DNA, 21 bp, synthetic construct
  source 1..21: mol_type = other DNA; mol_type = other DNA
tattcgcgtttgagtgacaat

SEQ ID NO: 30047 - DNA, 21 bp, synthetic construct
  source 1..21: mol_type = other DNA; mol_type = other DNA
tatcataggttgcaaagcaca

SEQ ID NO: 30048 - DNA, 21 bp, synthetic construct
  source 1..21: mol_type = other DNA; mol_type = other DNA
tatttcacgggctcagtcgac

SEQ ID NO: 30049 - DNA, 21 bp, synthetic construct
  source 1..21: mol_type = other DNA; mol_type = other DNA
cgcaatggtacgtccgcatgg

SEQ ID NO: 30050 - DNA, 21 bp, synthetic construct
  source 1..21: mol_type = other DNA; mol_type = other DNA
cgcgacggcaacagccgctgg

SEQ ID NO: 30051 - DNA, 21 bp, synthetic construct
  source 1..21: mol_type = other DNA; mol_type = other DNA
tggttctctggtaaagtggag

SEQ ID NO: 30052 - DNA, 21 bp, synthetic construct
  source 1..21: mol_type = other DNA; mol_type = other DNA
tactggacgggtaccatggaa

SEQ ID NO: 30053 - DNA, 21 bp, synthetic construct
  source 1..21: mol_type = other DNA; mol_type = other DNA
cattcgtccagtaacggtgtt

SEQ ID NO: 30054 - DNA, 21 bp, synthetic construct
  source 1..21: mol_type = other DNA; mol_type = other DNA
ggagggtcgggttcaacttgg

SEQ ID NO: 30055 - DNA, 21 bp, synthetic construct
  source 1..21: mol_type = other DNA; mol_type = other DNA
tggtgggggggagttaaggag

SEQ ID NO: 30056 - DNA, 21 bp, synthetic construct
  source 1..21: mol_type = other DNA; mol_type = other DNA
tatttctccggggtctcaatg

SEQ ID NO: 30057 - DNA, 21 bp, synthetic construct
  source 1..21: mol_type = other DNA; mol_type = other DNA
tactggcacggtatacctgag

SEQ ID NO: 30058 - DNA, 21 bp, synthetic construct
  source 1..21: mol_type = other DNA; mol_type = other DNA
tgtaaagacagcgcgaggcta

SEQ ID NO: 30059 - DNA, 21 bp, synthetic construct
  source 1..21: mol_type = other DNA; mol_type = other DNA
tactataccggccggttggac

SEQ ID NO: 30060 - DNA, 21 bp, synthetic construct
  source 1..21: mol_type = other DNA; mol_type = other DNA
cgtggcgatggtcattacaat

SEQ ID NO: 30061 - DNA, 21 bp, synthetic construct
  source 1..21: mol_type = other DNA; mol_type = other DNA
atcatcagcacaaacggaaga

SEQ ID NO: 30062 - DNA, 21 bp, synthetic construct
  source 1..21: mol_type = other DNA; mol_type = other DNA
tgtacatctaaactcggacat

SEQ ID NO: 30063 - DNA, 21 bp, synthetic construct
  source 1..21: mol_type = other DNA; mol_type = other DNA
gctatgccggacagaggttgg

SEQ ID NO: 30064 - DNA, 21 bp, synthetic construct
  source 1..21: mol_type = other DNA; mol_type = other DNA
tgggtgcgcagtgatgtcaaa

SEQ ID NO: 30065 - DNA, 21 bp, synthetic construct
  source 1..21: mol_type = other DNA; mol_type = other DNA
ttttcaaggctcagtccagtg

SEQ ID NO: 30066 - DNA, 21 bp, synthetic construct
  source 1..21: mol_type = other DNA; mol_type = other DNA
tgcaaacctttgatgtcgcca

SEQ ID NO: 30067 - DNA, 21 bp, synthetic construct
  source 1..21: mol_type = other DNA; mol_type = other DNA
tttagccgcacggggcataat

SEQ ID NO: 30068 - DNA, 21 bp, synthetic construct
  source 1..21: mol_type = other DNA; mol_type = other DNA
tacgtgagaagtcaacctctg

SEQ ID NO: 30069 - DNA, 21 bp, synthetic construct
  source 1..21: mol_type = other DNA; mol_type = other DNA
tacgctcgcctcggctataac

SEQ ID NO: 30070 - DNA, 21 bp, synthetic construct
  source 1..21: mol_type = other DNA; mol_type = other DNA
ggcgccgggaccagccgttgg

SEQ ID NO: 30071 - DNA, 21 bp, synthetic construct
  source 1..21: mol_type = other DNA; mol_type = other DNA
tattggaccgggatgacagaa

SEQ ID NO: 30072 - DNA, 21 bp, synthetic construct
  source 1..21: mol_type = other DNA; mol_type = other DNA
tatttctcgggtatgcatagt

SEQ ID NO: 30073 - DNA, 21 bp, synthetic construct
  source 1..21: mol_type = other DNA; mol_type = other DNA
ctacacaggaacacacaaaat

SEQ ID NO: 30074 - DNA, 21 bp, synthetic construct
  source 1..21: mol_type = other DNA; mol_type = other DNA
tactttcatgggaccgtcgat

SEQ ID NO: 30075 - DNA, 21 bp, synthetic construct
  source 1..21: mol_type = other DNA; mol_type = other DNA
atgtgggatggtacgatggcg

SEQ ID NO: 30076 - DNA, 21 bp, synthetic construct
  source 1..21: mol_type = other DNA; mol_type = other DNA
tattttcagggagtgcgcgaa

SEQ ID NO: 30077 - DNA, 21 bp, synthetic construct
  source 1..21: mol_type = other DNA; mol_type = other DNA
agatcaggtccatgccccttc

SEQ ID NO: 30078 - DNA, 21 bp, synthetic construct
  source 1..21: mol_type = other DNA; mol_type = other DNA
tggcatcctatgtgcaaagcc

SEQ ID NO: 30079 - DNA, 21 bp, synthetic construct
  source 1..21: mol_type = other DNA; mol_type = other DNA
tattacaccgggaaacaggat

SEQ ID NO: 30080 - DNA, 21 bp, synthetic construct
  source 1..21: mol_type = other DNA; mol_type = other DNA
cgcccagagacatgctcgccg

SEQ ID NO: 30081 - DNA, 21 bp, synthetic construct
  source 1..21: mol_type = other DNA; mol_type = other DNA
ggcgacgagtggcaaccttat

SEQ ID NO: 30082 - DNA, 21 bp, synthetic construct
  source 1..21: mol_type = other DNA; mol_type = other DNA
tggtggtcgggggttcaagaa

SEQ ID NO: 30083 - DNA, 21 bp, synthetic construct
  source 1..21: mol_type = other DNA; mol_type = other DNA
gttatgtacgatagttatccc

SEQ ID NO: 30084 - DNA, 21 bp, synthetic construct
  source 1..21: mol_type = other DNA; mol_type = other DNA
ctgcaccgtgcgacgtacgac

SEQ ID NO: 30085 - DNA, 21 bp, synthetic construct
  source 1..21: mol_type = other DNA; mol_type = other DNA
tatagcagactaaacctcaac

SEQ ID NO: 30086 - DNA, 21 bp, synthetic construct
  source 1..21: mol_type = other DNA; mol_type = other DNA
tactcacgcatggggcctaac

SEQ ID NO: 30087 - DNA, 21 bp, synthetic construct
  source 1..21: mol_type = other DNA; mol_type = other DNA
ttttcccggttaaactcaaat

SEQ ID NO: 30088 - DNA, 21 bp, synthetic construct
  source 1..21: mol_type = other DNA; mol_type = other DNA
tattcgaaatggaatcccaat

SEQ ID NO: 30089 - DNA, 21 bp, synthetic construct
  source 1..21: mol_type = other DNA; mol_type = other DNA
ttttttacaggcacttatgat

SEQ ID NO: 30090 - DNA, 21 bp, synthetic construct
  source 1..21: mol_type = other DNA; mol_type = other DNA
tactggactggcatgactgag

SEQ ID NO: 30091 - DNA, 21 bp, synthetic construct
  source 1..21: mol_type = other DNA; mol_type = other DNA
ggttgcaaaccatgcccaagc

SEQ ID NO: 30092 - DNA, 21 bp, synthetic construct
  source 1..21: mol_type = other DNA; mol_type = other DNA
tgtaagccagggatgggcgag

SEQ ID NO: 30093 - DNA, 21 bp, synthetic construct
  source 1..21: mol_type = other DNA; mol_type = other DNA
tacgccagaacgaatacgaat

SEQ ID NO: 30094 - DNA, 21 bp, synthetic construct
  source 1..21: mol_type = other DNA; mol_type = other DNA
tgcacaagtaagactgaccat

SEQ ID NO: 30095 - DNA, 21 bp, synthetic construct
  source 1..21: mol_type = other DNA; mol_type = other DNA
ggctgccggcatggtgactgc

SEQ ID NO: 30096 - DNA, 21 bp, synthetic construct
  source 1..21: mol_type = other DNA; mol_type = other DNA
tattgggcaggagtctcggcg

SEQ ID NO: 30097 - DNA, 21 bp, synthetic construct
  source 1..21: mol_type = other DNA; mol_type = other DNA
tatgacagcaccaatggccgt

SEQ ID NO: 30098 - DNA, 21 bp, synthetic construct
  source 1..21: mol_type = other DNA; mol_type = other DNA
tattggtccggcaagatcgac

SEQ ID NO: 30099 - DNA, 21 bp, synthetic construct
  source 1..21: mol_type = other DNA; mol_type = other DNA
tatagtcggttacaccaacta

SEQ ID NO: 30100 - DNA, 21 bp, synthetic construct
  source 1..21: mol_type = other DNA; mol_type = other DNA
tattttcagggaaagagagat

SEQ ID NO: 30101 - DNA, 21 bp, synthetic construct
  source 1..21: mol_type = other DNA; mol_type = other DNA
cggggccccgatacgtttccc

SEQ ID NO: 30102 - DNA, 21 bp, synthetic construct
  source 1..21: mol_type = other DNA; mol_type = other DNA
tcgagcatggtctcgtgtgcg

SEQ ID NO: 30103 - DNA, 21 bp, synthetic construct
  source 1..21: mol_type = other DNA; mol_type = other DNA
gacctccgagatgtgaagtgg

SEQ ID NO: 30104 - DNA, 21 bp, synthetic construct
  source 1..21: mol_type = other DNA; mol_type = other DNA
agagatggaaccagtcaatgg

SEQ ID NO: 30105 - DNA, 21 bp, synthetic construct
  source 1..21: mol_type = other DNA; mol_type = other DNA
tacttccatggacaacttgac

SEQ ID NO: 30106 - DNA, 21 bp, synthetic construct
  source 1..21: mol_type = other DNA; mol_type = other DNA
tacagcaggctaaacgaaaac

SEQ ID NO: 30107 - DNA, 21 bp, synthetic construct
  source 1..21: mol_type = other DNA; mol_type = other DNA
tatgctcgcaatgggaccaac

SEQ ID NO: 30108 - DNA, 21 bp, synthetic construct
  source 1..21: mol_type = other DNA; mol_type = other DNA
tatgcaaggatcggaataaac

SEQ ID NO: 30109 - DNA, 21 bp, synthetic construct
  source 1..21: mol_type = other DNA; mol_type = other DNA
tttagtagagccggaataaat

SEQ ID NO: 30110 - DNA, 21 bp, synthetic construct
  source 1..21: mol_type = other DNA; mol_type = other DNA
tacagtaggacgggacacaat

SEQ ID NO: 30111 - DNA, 21 bp, synthetic construct
  source 1..21: mol_type = other DNA; mol_type = other DNA
gacgcttttagaggtttcgac

SEQ ID NO: 30112 - DNA, 21 bp, synthetic construct
  source 1..21: mol_type = other DNA; mol_type = other DNA
tgcaaagacggaaccacgagt

SEQ ID NO: 30113 - DNA, 21 bp, synthetic construct
  source 1..21: mol_type = other DNA; mol_type = other DNA
aaggacggatattctatgtac

SEQ ID NO: 30114 - DNA, 21 bp, synthetic construct
  source 1..21: mol_type = other DNA; mol_type = other DNA
aaagatgaatataaatactat

SEQ ID NO: 30115 - DNA, 21 bp, synthetic construct
  source 1..21: mol_type = other DNA; mol_type = other DNA
tatgctaagcatggatataat

SEQ ID NO: 30116 - DNA, 21 bp, synthetic construct
  source 1..21: mol_type = other DNA; mol_type = other DNA
acgtgggacggtatgatagca

SEQ ID NO: 30117 - DNA, 21 bp, synthetic construct
  source 1..21: mol_type = other DNA; mol_type = other DNA
agaggaggtgggttgtacgtc

SEQ ID NO: 30118 - DNA, 21 bp, synthetic construct
  source 1..21: mol_type = other DNA; mol_type = other DNA
tacagccgaaagaatgaaaac

SEQ ID NO: 30119 - DNA, 21 bp, synthetic construct
  source 1..21: mol_type = other DNA; mol_type = other DNA
ctctccaaggtaggcccagac

SEQ ID NO: 30120 - DNA, 21 bp, synthetic construct
  source 1..21: mol_type = other DNA; mol_type = other DNA
tatgcaaaaggaaacacgaat

SEQ ID NO: 30121 - DNA, 21 bp, synthetic construct
  source 1..21: mol_type = other DNA; mol_type = other DNA
ggcggcgaattcagtaggtgg

SEQ ID NO: 30122 - DNA, 21 bp, synthetic construct
  source 1..21: mol_type = other DNA; mol_type = other DNA
ttttggtcgggggtcagggag

SEQ ID NO: 30123 - DNA, 21 bp, synthetic construct
  source 1..21: mol_type = other DNA; mol_type = other DNA
ttagcgaaggccggttacaat

SEQ ID NO: 30124 - DNA, 21 bp, synthetic construct
  source 1..21: mol_type = other DNA; mol_type = other DNA
aaacacgactttactggttgc

SEQ ID NO: 30125 - DNA, 21 bp, synthetic construct
  source 1..21: mol_type = other DNA; mol_type = other DNA
atcgggagaaccggttgggat

SEQ ID NO: 30126 - DNA, 21 bp, synthetic construct
  source 1..21: mol_type = other DNA; mol_type = other DNA
tacttccaaggtaaacgtgac

SEQ ID NO: 30127 - DNA, 21 bp, synthetic construct
  source 1..21: mol_type = other DNA; mol_type = other DNA
tactgggccggaaaaatcgag

SEQ ID NO: 30128 - DNA, 21 bp, synthetic construct
  source 1..21: mol_type = other DNA; mol_type = other DNA
tatacacgactatcgatgaac

SEQ ID NO: 30129 - DNA, 21 bp, synthetic construct
  source 1..21: mol_type = other DNA; mol_type = other DNA
tacttcacgggacgcaatgac

SEQ ID NO: 30130 - DNA, 21 bp, synthetic construct
  source 1..21: mol_type = other DNA; mol_type = other DNA
tacacacactcaaacaaattt

SEQ ID NO: 30131 - DNA, 21 bp, synthetic construct
  source 1..21: mol_type = other DNA; mol_type = other DNA
acttggtctgataatggggta

SEQ ID NO: 30132 - DNA, 21 bp, synthetic construct
  source 1..21: mol_type = other DNA; mol_type = other DNA
tactctcgagctggcacgaac

SEQ ID NO: 30133 - DNA, 21 bp, synthetic construct
  source 1..21: mol_type = other DNA; mol_type = other DNA
cgtgctgaagactacttcccc

SEQ ID NO: 30134 - DNA, 21 bp, synthetic construct
  source 1..21: mol_type = other DNA; mol_type = other DNA
tacagtaggactggaactaat

SEQ ID NO: 30135 - DNA, 21 bp, synthetic construct
  source 1..21: mol_type = other DNA; mol_type = other DNA
acgttgagcagtcgtgattgg

SEQ ID NO: 30136 - DNA, 21 bp, synthetic construct
  source 1..21: mol_type = other DNA; mol_type = other DNA
tgtaaggataatagggcgcta

SEQ ID NO: 30137 - DNA, 21 bp, synthetic construct
  source 1..21: mol_type = other DNA; mol_type = other DNA
tactggtccggacagaaggat

SEQ ID NO: 30138 - DNA, 21 bp, synthetic construct
  source 1..21: mol_type = other DNA; mol_type = other DNA
tttgagtcaactaatggaata

SEQ ID NO: 30139 - DNA, 21 bp, synthetic construct
  source 1..21: mol_type = other DNA; mol_type = other DNA
ttggctaaaactgcctgtaac

SEQ ID NO: 30140 - DNA, 21 bp, synthetic construct
  source 1..21: mol_type = other DNA; mol_type = other DNA
tattggtccaaagtacaggct

SEQ ID NO: 30141 - DNA, 21 bp, synthetic construct
  source 1..21: mol_type = other DNA; mol_type = other DNA
ttctcaagacagggtccgaac

SEQ ID NO: 30142 - DNA, 21 bp, synthetic construct
  source 1..21: mol_type = other DNA; mol_type = other DNA
tacttctccggtacacacaac

SEQ ID NO: 30143 - DNA, 21 bp, synthetic construct
  source 1..21: mol_type = other DNA; mol_type = other DNA
agggatgagtttgtcaagtgg

SEQ ID NO: 30144 - DNA, 21 bp, synthetic construct
  source 1..21: mol_type = other DNA; mol_type = other DNA
agcagtggaacgagtcgttgg

SEQ ID NO: 30145 - DNA, 21 bp, synthetic construct
  source 1..21: mol_type = other DNA; mol_type = other DNA
atattgagcgataggatgtgg

SEQ ID NO: 30146 - DNA, 21 bp, synthetic construct
  source 1..21: mol_type = other DNA; mol_type = other DNA
tatttctcgggtattcccgtt

SEQ ID NO: 30147 - DNA, 21 bp, synthetic construct
  source 1..21: mol_type = other DNA; mol_type = other DNA
cgcacttacgactcgattgcc

SEQ ID NO: 30148 - DNA, 21 bp, synthetic construct
  source 1..21: mol_type = other DNA; mol_type = other DNA
aaagacgattggactccttac

SEQ ID NO: 30149 - DNA, 21 bp, synthetic construct
  source 1..21: mol_type = other DNA; mol_type = other DNA
gtgagcacacactcttgcgcc

SEQ ID NO: 30150 - DNA, 21 bp, synthetic construct
  source 1..21: mol_type = other DNA; mol_type = other DNA
tactacagcggccagaaggaa

SEQ ID NO: 30151 - DNA, 21 bp, synthetic construct
  source 1..21: mol_type = other DNA; mol_type = other DNA
tacgcccgactaggcacaaat

SEQ ID NO: 30152 - DNA, 21 bp, synthetic construct
  source 1..21: mol_type = other DNA; mol_type = other DNA
tgcaagaagccgtctcctgag

SEQ ID NO: 30153 - DNA, 21 bp, synthetic construct
  source 1..21: mol_type = other DNA; mol_type = other DNA
tactttaccagggtaatggag

SEQ ID NO: 30154 - DNA, 21 bp, synthetic construct
  source 1..21: mol_type = other DNA; mol_type = other DNA
tactacaccggtgtatcattg

SEQ ID NO: 30155 - DNA, 21 bp, synthetic construct
  source 1..21: mol_type = other DNA; mol_type = other DNA
tatttttctggactaagggag

SEQ ID NO: 30156 - DNA, 21 bp, synthetic construct
  source 1..21: mol_type = other DNA; mol_type = other DNA
tatgcacgcggttcaccgaat

SEQ ID NO: 30157 - DNA, 21 bp, synthetic construct
  source 1..21: mol_type = other DNA; mol_type = other DNA
tacttcagcggagtgcacaaa

SEQ ID NO: 30158 - DNA, 21 bp, synthetic construct
  source 1..21: mol_type = other DNA; mol_type = other DNA
tgtgccccgtatttaccagag

SEQ ID NO: 30159 - DNA, 21 bp, synthetic construct
  source 1..21: mol_type = other DNA; mol_type = other DNA
tgcggccctagaaacccggaa

SEQ ID NO: 30160 - DNA, 21 bp, synthetic construct
  source 1..21: mol_type = other DNA; mol_type = other DNA
ggtgatggtagctgcaaagca

SEQ ID NO: 30161 - DNA, 21 bp, synthetic construct
  source 1..21: mol_type = other DNA; mol_type = other DNA
tatttccacggaattcctgat

SEQ ID NO: 30162 - DNA, 21 bp, synthetic construct
  source 1..21: mol_type = other DNA; mol_type = other DNA
atccagttagattgtaagggt

SEQ ID NO: 30163 - DNA, 21 bp, synthetic construct
  source 1..21: mol_type = other DNA; mol_type = other DNA
cttagcaaggcagggaataat

SEQ ID NO: 30164 - DNA, 21 bp, synthetic construct
  source 1..21: mol_type = other DNA; mol_type = other DNA
aacatgacatctcactcctgg

SEQ ID NO: 30165 - DNA, 21 bp, synthetic construct
  source 1..21: mol_type = other DNA; mol_type = other DNA
tatagtaggtcaaacataaac

SEQ ID NO: 30166 - DNA, 21 bp, synthetic construct
  source 1..21: mol_type = other DNA; mol_type = other DNA
tacgcacgtaatggtgataac

SEQ ID NO: 30167 - DNA, 21 bp, synthetic construct
  source 1..21: mol_type = other DNA; mol_type = other DNA
tattggacggggatgcatgag

SEQ ID NO: 30168 - DNA, 21 bp, synthetic construct
  source 1..21: mol_type = other DNA; mol_type = other DNA
aggttagaatcgatatcgtgg

SEQ ID NO: 30169 - DNA, 21 bp, synthetic construct
  source 1..21: mol_type = other DNA; mol_type = other DNA
tactttaccgggatgcaagag

SEQ ID NO: 30170 - DNA, 21 bp, synthetic construct
  source 1..21: mol_type = other DNA; mol_type = other DNA
tactggcagggtgttagggaa

SEQ ID NO: 30171 - DNA, 21 bp, synthetic construct
  source 1..21: mol_type = other DNA; mol_type = other DNA
cgtgcctttgacgcatatgag

SEQ ID NO: 30172 - DNA, 21 bp, synthetic construct
  source 1..21: mol_type = other DNA; mol_type = other DNA
cttagcaaagctggccataac

SEQ ID NO: 30173 - DNA, 21 bp, synthetic construct
  source 1..21: mol_type = other DNA; mol_type = other DNA
tatgctagggtgggtttaaat

SEQ ID NO: 30174 - DNA, 21 bp, synthetic construct
  source 1..21: mol_type = other DNA; mol_type = other DNA
tactttacggcggttaaggaa

SEQ ID NO: 30175 - DNA, 21 bp, synthetic construct
  source 1..21: mol_type = other DNA; mol_type = other DNA
agagatggcaactccatgtgg

SEQ ID NO: 30176 - DNA, 21 bp, synthetic construct
  source 1..21: mol_type = other DNA; mol_type = other DNA
tgtaaaactaagtcgaccgaa

SEQ ID NO: 30177 - DNA, 21 bp, synthetic construct
  source 1..21: mol_type = other DNA; mol_type = other DNA
ttctcacgtgttcaaccaaat

SEQ ID NO: 30178 - DNA, 21 bp, synthetic construct
  source 1..21: mol_type = other DNA; mol_type = other DNA
aggaacgatttttcaacatac

SEQ ID NO: 30179 - DNA, 21 bp, synthetic construct
  source 1..21: mol_type = other DNA; mol_type = other DNA
tgcaagcgagatgccgaaagc

SEQ ID NO: 30180 - DNA, 21 bp, synthetic construct
  source 1..21: mol_type = other DNA; mol_type = other DNA
tgcacttctaaaacgacacat

SEQ ID NO: 30181 - DNA, 21 bp, synthetic construct
  source 1..21: mol_type = other DNA; mol_type = other DNA
ttcagtcgggtcggagacaat

SEQ ID NO: 30182 - DNA, 21 bp, synthetic construct
  source 1..21: mol_type = other DNA; mol_type = other DNA
tatgtcaagtcggatggttca

SEQ ID NO: 30183 - DNA, 21 bp, synthetic construct
  source 1..21: mol_type = other DNA; mol_type = other DNA
catacaagttctaacggcgta

SEQ ID NO: 30184 - DNA, 21 bp, synthetic construct
  source 1..21: mol_type = other DNA; mol_type = other DNA
ttaaggtctgggtgtggacca

SEQ ID NO: 30185 - DNA, 21 bp, synthetic construct
  source 1..21: mol_type = other DNA; mol_type = other DNA
gtcccgtcctctgccatttgg

SEQ ID NO: 30186 - DNA, 21 bp, synthetic construct
  source 1..21: mol_type = other DNA; mol_type = other DNA
tactccaggagcggcttaaac

SEQ ID NO: 30187 - DNA, 21 bp, synthetic construct
  source 1..21: mol_type = other DNA; mol_type = other DNA
tctttggcggatcgtaagtgg

SEQ ID NO: 30188 - DNA, 21 bp, synthetic construct
  source 1..21: mol_type = other DNA; mol_type = other DNA
gctccaggcaatatcagctgg

SEQ ID NO: 30189 - DNA, 21 bp, synthetic construct
  source 1..21: mol_type = other DNA; mol_type = other DNA
tttcatcgattgtcaactaac

SEQ ID NO: 30190 - DNA, 21 bp, synthetic construct
  source 1..21: mol_type = other DNA; mol_type = other DNA
ttcagtcgggccggcaataac

SEQ ID NO: 30191 - DNA, 21 bp, synthetic construct
  source 1..21: mol_type = other DNA; mol_type = other DNA
tcaatgtccgatcggagttgg

SEQ ID NO: 30192 - DNA, 21 bp, synthetic construct
  source 1..21: mol_type = other DNA; mol_type = other DNA
ttttggacaggaaaaatagaa

SEQ ID NO: 30193 - DNA, 21 bp, synthetic construct
  source 1..21: mol_type = other DNA; mol_type = other DNA
tatttccatggtaagcacgat

SEQ ID NO: 30194 - DNA, 21 bp, synthetic construct
  source 1..21: mol_type = other DNA; mol_type = other DNA
tatttccatgggcaactggag

SEQ ID NO: 30195 - DNA, 21 bp, synthetic construct
  source 1..21: mol_type = other DNA; mol_type = other DNA
tacagtaagaccggcgacaac

SEQ ID NO: 30196 - DNA, 21 bp, synthetic construct
  source 1..21: mol_type = other DNA; mol_type = other DNA
ggtgctccggcctgcaaagaa

SEQ ID NO: 30197 - DNA, 21 bp, synthetic construct
  source 1..21: mol_type = other DNA; mol_type = other DNA
gtgatgggtgacagaaagtgg

SEQ ID NO: 30198 - DNA, 21 bp, synthetic construct
  source 1..21: mol_type = other DNA; mol_type = other DNA
agggataatacagtgtatccc

SEQ ID NO: 30199 - DNA, 21 bp, synthetic construct
  source 1..21: mol_type = other DNA; mol_type = other DNA
gggtccgaatttttaccgtgg

SEQ ID NO: 30200 - DNA, 21 bp, synthetic construct
  source 1..21: mol_type = other DNA; mol_type = other DNA
agagaagattacagtacgtat

SEQ ID NO: 30201 - DNA, 21 bp, synthetic construct
  source 1..21: mol_type = other DNA; mol_type = other DNA
agggagacatacgtctacccc

SEQ ID NO: 30202 - DNA, 21 bp, synthetic construct
  source 1..21: mol_type = other DNA; mol_type = other DNA
aggtcggactttaaaatcttc

SEQ ID NO: 30203 - DNA, 21 bp, synthetic construct
  source 1..21: mol_type = other DNA; mol_type = other DNA
tacgtccacagccagaattat

SEQ ID NO: 30204 - DNA, 21 bp, synthetic construct
  source 1..21: mol_type = other DNA; mol_type = other DNA
tgcacaaacaatggaaataga

SEQ ID NO: 30205 - DNA, 21 bp, synthetic construct
  source 1..21: mol_type = other DNA; mol_type = other DNA
aaggacgattggaatagctgg

SEQ ID NO: 30206 - DNA, 21 bp, synthetic construct
  source 1..21: mol_type = other DNA; mol_type = other DNA
gtgggcaatcgcggatgggat

SEQ ID NO: 30207 - DNA, 21 bp, synthetic construct
  source 1..21: mol_type = other DNA; mol_type = other DNA
catgaaacctgcgtcaggggc

SEQ ID NO: 30208 - DNA, 21 bp, synthetic construct
  source 1..21: mol_type = other DNA; mol_type = other DNA
tattctcgtgttgacgaccgc

SEQ ID NO: 30209 - DNA, 21 bp, synthetic construct
  source 1..21: mol_type = other DNA; mol_type = other DNA
agggaggaaatggtttcttgg

SEQ ID NO: 30210 - DNA, 21 bp, synthetic construct
  source 1..21: mol_type = other DNA; mol_type = other DNA
tgcaaaagtaaatgccttccc

SEQ ID NO: 30211 - DNA, 21 bp, synthetic construct
  source 1..21: mol_type = other DNA; mol_type = other DNA
tatatttcaaccaatggtgta

SEQ ID NO: 30212 - DNA, 21 bp, synthetic construct
  source 1..21: mol_type = other DNA; mol_type = other DNA
tatttccacggaaaatcggat

SEQ ID NO: 30213 - DNA, 21 bp, synthetic construct
  source 1..21: mol_type = other DNA; mol_type = other DNA
aggggtcacgaaggttatttt

SEQ ID NO: 30214 - DNA, 21 bp, synthetic construct
  source 1..21: mol_type = other DNA; mol_type = other DNA
tgtaagccagacgccattcgt

SEQ ID NO: 30215 - DNA, 21 bp, synthetic construct
  source 1..21: mol_type = other DNA; mol_type = other DNA
gggttagctgataggagctgg

SEQ ID NO: 30216 - DNA, 21 bp, synthetic construct
  source 1..21: mol_type = other DNA; mol_type = other DNA
aaggtatgttcggcaactgac

SEQ ID NO: 30217 - DNA, 21 bp, synthetic construct
  source 1..21: mol_type = other DNA; mol_type = other DNA
gattacgccagccgagattgg

SEQ ID NO: 30218 - DNA, 21 bp, synthetic construct
  source 1..21: mol_type = other DNA; mol_type = other DNA
tattttactggtgttaccgtt

SEQ ID NO: 30219 - DNA, 21 bp, synthetic construct
  source 1..21: mol_type = other DNA; mol_type = other DNA
tattcaaggacgggtttcaat

SEQ ID NO: 30220 - DNA, 21 bp, synthetic construct
  source 1..21: mol_type = other DNA; mol_type = other DNA
tactatagtggggtgaaacag

SEQ ID NO: 30221 - DNA, 21 bp, synthetic construct
  source 1..21: mol_type = other DNA; mol_type = other DNA
cgtgatgccactagcggttgg

SEQ ID NO: 30222 - DNA, 21 bp, synthetic construct
  source 1..21: mol_type = other DNA; mol_type = other DNA
tacttctctggtcaactagcc

SEQ ID NO: 30223 - DNA, 21 bp, synthetic construct
  source 1..21: mol_type = other DNA; mol_type = other DNA
tattggtcaggcacgcacgaa

SEQ ID NO: 30224 - DNA, 21 bp, synthetic construct
  source 1..21: mol_type = other DNA; mol_type = other DNA
tatagtagggcgaacttgaat

SEQ ID NO: 30225 - DNA, 21 bp, synthetic construct
  source 1..21: mol_type = other DNA; mol_type = other DNA
aaggatgattacaacgtatat

SEQ ID NO: 30226 - DNA, 21 bp, synthetic construct
  source 1..21: mol_type = other DNA; mol_type = other DNA
tacttcgcggggcggtatgac

SEQ ID NO: 30227 - DNA, 21 bp, synthetic construct
  source 1..21: mol_type = other DNA; mol_type = other DNA
agcttagaatcacgcgcgtgg

SEQ ID NO: 30228 - DNA, 21 bp, synthetic construct
  source 1..21: mol_type = other DNA; mol_type = other DNA
gggtgcggtggtggtggggga

SEQ ID NO: 30229 - DNA, 21 bp, synthetic construct
  source 1..21: mol_type = other DNA; mol_type = other DNA
ccagatagtaccaacggacgc

SEQ ID NO: 30230 - DNA, 21 bp, synthetic construct
  source 1..21: mol_type = other DNA; mol_type = other DNA
tatgtacgttcggacgactcg

SEQ ID NO: 30231 - DNA, 21 bp, synthetic construct
  source 1..21: mol_type = other DNA; mol_type = other DNA
tattttaccgggcgggaggat

SEQ ID NO: 30232 - DNA, 21 bp, synthetic construct
  source 1..21: mol_type = other DNA; mol_type = other DNA
tacgcacgcagtggcaataac

SEQ ID NO: 30233 - DNA, 21 bp, synthetic construct
  source 1..21: mol_type = other DNA; mol_type = other DNA
tatagcaagaatgggttaaat

SEQ ID NO: 30234 - DNA, 21 bp, synthetic construct
  source 1..21: mol_type = other DNA; mol_type = other DNA
tatagccgtatcggtgaaaat

SEQ ID NO: 30235 - DNA, 21 bp, synthetic construct
  source 1..21: mol_type = other DNA; mol_type = other DNA
ttctctaagcacaattacaac

SEQ ID NO: 30236 - DNA, 21 bp, synthetic construct
  source 1..21: mol_type = other DNA; mol_type = other DNA
gagagcagcagcaggacctgg

SEQ ID NO: 30237 - DNA, 21 bp, synthetic construct
  source 1..21: mol_type = other DNA; mol_type = other DNA
tatttcacgggcatgtacgat

SEQ ID NO: 30238 - DNA, 21 bp, synthetic construct
  source 1..21: mol_type = other DNA; mol_type = other DNA
tgtagcaagctcaagcctggg

SEQ ID NO: 30239 - DNA, 21 bp, synthetic construct
  source 1..21: mol_type = other DNA; mol_type = other DNA
gggaacggtacaagtaggtgg

SEQ ID NO: 30240 - DNA, 21 bp, synthetic construct
  source 1..21: mol_type = other DNA; mol_type = other DNA
attgacagcacaaacggggtc

SEQ ID NO: 30241 - DNA, 21 bp, synthetic construct
  source 1..21: mol_type = other DNA; mol_type = other DNA
tgtaaagctccagataaaggg

SEQ ID NO: 30242 - DNA, 21 bp, synthetic construct
  source 1..21: mol_type = other DNA; mol_type = other DNA
tacgctcgcaccgggtacaat

SEQ ID NO: 30243 - DNA, 21 bp, synthetic construct
  source 1..21: mol_type = other DNA; mol_type = other DNA
tatcaccggttgtcgagagac

SEQ ID NO: 30244 - DNA, 21 bp, synthetic construct
  source 1..21: mol_type = other DNA; mol_type = other DNA
tatttcagtgggatccactta

SEQ ID NO: 30245 - DNA, 21 bp, synthetic construct
  source 1..21: mol_type = other DNA; mol_type = other DNA
tactttagtggaatgatggaa

SEQ ID NO: 30246 - DNA, 21 bp, synthetic construct
  source 1..21: mol_type = other DNA; mol_type = other DNA
tactggacggggacatcggca

SEQ ID NO: 30247 - DNA, 21 bp, synthetic construct
  source 1..21: mol_type = other DNA; mol_type = other DNA
tatgcgcgcataggtattaat

SEQ ID NO: 30248 - DNA, 21 bp, synthetic construct
  source 1..21: mol_type = other DNA; mol_type = other DNA
tactttacggggtgtagggat

SEQ ID NO: 30249 - DNA, 21 bp, synthetic construct
  source 1..21: mol_type = other DNA; mol_type = other DNA
tacgtaaagtcgcaggttatc

SEQ ID NO: 30250 - DNA, 21 bp, synthetic construct
  source 1..21: mol_type = other DNA; mol_type = other DNA
tacgctcgaatcggggcaaat

SEQ ID NO: 30251 - DNA, 21 bp, synthetic construct
  source 1..21: mol_type = other DNA; mol_type = other DNA
tatagcaaaatgggagtaaac

SEQ ID NO: 30252 - DNA, 21 bp, synthetic construct
  source 1..21: mol_type = other DNA; mol_type = other DNA
ccctacgcgagatccgtcgac

SEQ ID NO: 30253 - DNA, 21 bp, synthetic construct
  source 1..21: mol_type = other DNA; mol_type = other DNA
tacagtagacacaatgcgaat

SEQ ID NO: 30254 - DNA, 21 bp, synthetic construct
  source 1..21: mol_type = other DNA; mol_type = other DNA
agaagtgggccatgcgcaata

SEQ ID NO: 30255 - DNA, 21 bp, synthetic construct
  source 1..21: mol_type = other DNA; mol_type = other DNA
cacttggcttctcatacttgg

SEQ ID NO: 30256 - DNA, 21 bp, synthetic construct
  source 1..21: mol_type = other DNA; mol_type = other DNA
gtatggagctccaacggagtg

SEQ ID NO: 30257 - DNA, 21 bp, synthetic construct
  source 1..21: mol_type = other DNA; mol_type = other DNA
cccgaggcagggtgtaaggat

SEQ ID NO: 30258 - DNA, 21 bp, synthetic construct
  source 1..21: mol_type = other DNA; mol_type = other DNA
gtattagcgagtgtcacttgg

SEQ ID NO: 30259 - DNA, 21 bp, synthetic construct
  source 1..21: mol_type = other DNA; mol_type = other DNA
caaggagtaagtagagaatgg

SEQ ID NO: 30260 - DNA, 21 bp, synthetic construct
  source 1..21: mol_type = other DNA; mol_type = other DNA
tacgattcgactaacgggagg

SEQ ID NO: 30261 - DNA, 21 bp, synthetic construct
  source 1..21: mol_type = other DNA; mol_type = other DNA
tactcgaggtctggagcgaac

SEQ ID NO: 30262 - DNA, 21 bp, synthetic construct
  source 1..21: mol_type = other DNA; mol_type = other DNA
aaggatgacttttcgatgtac

SEQ ID NO: 30263 - DNA, 21 bp, synthetic construct
  source 1..21: mol_type = other DNA; mol_type = other DNA
tattacagcggaaaaattgat

SEQ ID NO: 30264 - DNA, 21 bp, synthetic construct
  source 1..21: mol_type = other DNA; mol_type = other DNA
aaacgtgatattacctgtgcc

SEQ ID NO: 30265 - DNA, 21 bp, synthetic construct
  source 1..21: mol_type = other DNA; mol_type = other DNA
tattctagacttaatacaaat

SEQ ID NO: 30266 - DNA, 21 bp, synthetic construct
  source 1..21: mol_type = other DNA; mol_type = other DNA
tttttctctaccaacgggatt

SEQ ID NO: 30267 - DNA, 21 bp, synthetic construct
  source 1..21: mol_type = other DNA; mol_type = other DNA
tgcaagcccagaactggagag

SEQ ID NO: 30268 - DNA, 21 bp, synthetic construct
  source 1..21: mol_type = other DNA; mol_type = other DNA
atgtttgacggtaccgaggca

SEQ ID NO: 30269 - DNA, 21 bp, synthetic construct
  source 1..21: mol_type = other DNA; mol_type = other DNA
actctatcatcaagggactgg

SEQ ID NO: 30270 - DNA, 21 bp, synthetic construct
  source 1..21: mol_type = other DNA; mol_type = other DNA
aggacccgggatagctaccct

SEQ ID NO: 30271 - DNA, 21 bp, synthetic construct
  source 1..21: mol_type = other DNA; mol_type = other DNA
tactcccgaattgggttgaat

SEQ ID NO: 30272 - DNA, 21 bp, synthetic construct
  source 1..21: mol_type = other DNA; mol_type = other DNA
acctggacaggtgaaaatgca

SEQ ID NO: 30273 - DNA, 21 bp, synthetic construct
  source 1..21: mol_type = other DNA; mol_type = other DNA
tatttcagtggagtcccgaca

SEQ ID NO: 30274 - DNA, 21 bp, synthetic construct
  source 1..21: mol_type = other DNA; mol_type = other DNA
agggatgaattcaattccttc

SEQ ID NO: 30275 - DNA, 21 bp, synthetic construct
  source 1..21: mol_type = other DNA; mol_type = other DNA
tacacaaggctcgacgtgttg

SEQ ID NO: 30276 - DNA, 21 bp, synthetic construct
  source 1..21: mol_type = other DNA; mol_type = other DNA
tacgctaaacagggaatgaac

SEQ ID NO: 30277 - DNA, 21 bp, synthetic construct
  source 1..21: mol_type = other DNA; mol_type = other DNA
tacttcgcaggcgttgttggg

SEQ ID NO: 30278 - DNA, 21 bp, synthetic construct
  source 1..21: mol_type = other DNA; mol_type = other DNA
tacttcgcgggcgttaaggat

SEQ ID NO: 30279 - DNA, 21 bp, synthetic construct
  source 1..21: mol_type = other DNA; mol_type = other DNA
ttcgcgaagcacggatgtggg

SEQ ID NO: 30280 - DNA, 21 bp, synthetic construct
  source 1..21: mol_type = other DNA; mol_type = other DNA
caggacggttcgagtagttgg

SEQ ID NO: 30281 - DNA, 21 bp, synthetic construct
  source 1..21: mol_type = other DNA; mol_type = other DNA
tactcgaggttaggtgaaaat

SEQ ID NO: 30282 - DNA, 21 bp, synthetic construct
  source 1..21: mol_type = other DNA; mol_type = other DNA
caagacggttacagtaaatat

SEQ ID NO: 30283 - DNA, 21 bp, synthetic construct
  source 1..21: mol_type = other DNA; mol_type = other DNA
tgtaaacctcaaaccccgcaa

SEQ ID NO: 30284 - DNA, 21 bp, synthetic construct
  source 1..21: mol_type = other DNA; mol_type = other DNA
ggatcagagaatgttcgttgg

SEQ ID NO: 30285 - DNA, 21 bp, synthetic construct
  source 1..21: mol_type = other DNA; mol_type = other DNA
cgtgaagagagtttgtattgg

SEQ ID NO: 30286 - DNA, 21 bp, synthetic construct
  source 1..21: mol_type = other DNA; mol_type = other DNA
tgtaaaccagattacagggaa

SEQ ID NO: 30287 - DNA, 21 bp, synthetic construct
  source 1..21: mol_type = other DNA; mol_type = other DNA
ttattgagtagtgccgactgg

SEQ ID NO: 30288 - DNA, 21 bp, synthetic construct
  source 1..21: mol_type = other DNA; mol_type = other DNA
tacagccgcgcgggaatgaac

SEQ ID NO: 30289 - DNA, 21 bp, synthetic construct
  source 1..21: mol_type = other DNA; mol_type = other DNA
tactggacagggactatcgag

SEQ ID NO: 30290 - DNA, 21 bp, synthetic construct
  source 1..21: mol_type = other DNA; mol_type = other DNA
tactttaccggaagaacccag

SEQ ID NO: 30291 - DNA, 21 bp, synthetic construct
  source 1..21: mol_type = other DNA; mol_type = other DNA
cgtaatgacttcagcacgtat

SEQ ID NO: 30292 - DNA, 21 bp, synthetic construct
  source 1..21: mol_type = other DNA; mol_type = other DNA
attggagaaagagggtgggat

SEQ ID NO: 30293 - DNA, 21 bp, synthetic construct
  source 1..21: mol_type = other DNA; mol_type = other DNA
tactacactggtgtcactagg

SEQ ID NO: 30294 - DNA, 21 bp, synthetic construct
  source 1..21: mol_type = other DNA; mol_type = other DNA
atgactggtaccagctgcaat

SEQ ID NO: 30295 - DNA, 21 bp, synthetic construct
  source 1..21: mol_type = other DNA; mol_type = other DNA
agctatgcgaaatctttattg

SEQ ID NO: 30296 - DNA, 21 bp, synthetic construct
  source 1..21: mol_type = other DNA; mol_type = other DNA
gtaccagatttcgtcaagtgg

SEQ ID NO: 30297 - DNA, 21 bp, synthetic construct
  source 1..21: mol_type = other DNA; mol_type = other DNA
ccgaacagtaccaatggtgtt

SEQ ID NO: 30298 - DNA, 21 bp, synthetic construct
  source 1..21: mol_type = other DNA; mol_type = other DNA
tattttgccggagtcgtagga

SEQ ID NO: 30299 - DNA, 21 bp, synthetic construct
  source 1..21: mol_type = other DNA; mol_type = other DNA
tatgcgaaagccgggaataac

SEQ ID NO: 30300 - DNA, 21 bp, synthetic construct
  source 1..21: mol_type = other DNA; mol_type = other DNA
ctctcgcgccaaaattttaat

SEQ ID NO: 30301 - DNA, 21 bp, synthetic construct
  source 1..21: mol_type = other DNA; mol_type = other DNA
tactggcagggcaaaatagca

SEQ ID NO: 30302 - DNA, 21 bp, synthetic construct
  source 1..21: mol_type = other DNA; mol_type = other DNA
tacgctagaattggttccaac

SEQ ID NO: 30303 - DNA, 21 bp, synthetic construct
  source 1..21: mol_type = other DNA; mol_type = other DNA
tgtaaaggtacggatggaccc

SEQ ID NO: 30304 - DNA, 21 bp, synthetic construct
  source 1..21: mol_type = other DNA; mol_type = other DNA
tatgctaggcttgggatgaac

SEQ ID NO: 30305 - DNA, 21 bp, synthetic construct
  source 1..21: mol_type = other DNA; mol_type = other DNA
tttttgaagagccaaagttac

SEQ ID NO: 30306 - DNA, 21 bp, synthetic construct
  source 1..21: mol_type = other DNA; mol_type = other DNA
tgtaaatcggggcagggtgcc

SEQ ID NO: 30307 - DNA, 21 bp, synthetic construct
  source 1..21: mol_type = other DNA; mol_type = other DNA
agagacagcaccaacggggtc

SEQ ID NO: 30308 - DNA, 21 bp, synthetic construct
  source 1..21: mol_type = other DNA; mol_type = other DNA
tactcaaaacataacaacaac

SEQ ID NO: 30309 - DNA, 21 bp, synthetic construct
  source 1..21: mol_type = other DNA; mol_type = other DNA
ttgtatgatggaactaacgcg

SEQ ID NO: 30310 - DNA, 21 bp, synthetic construct
  source 1..21: mol_type = other DNA; mol_type = other DNA
cgtgccgcggaagtataccct

SEQ ID NO: 30311 - DNA, 21 bp, synthetic construct
  source 1..21: mol_type = other DNA; mol_type = other DNA
cgcgggggcaccagcgcctgg

SEQ ID NO: 30312 - DNA, 21 bp, synthetic construct
  source 1..21: mol_type = other DNA; mol_type = other DNA
tgtaagcccggtagtccagga

SEQ ID NO: 30313 - DNA, 21 bp, synthetic construct
  source 1..21: mol_type = other DNA; mol_type = other DNA
tacgcgcgggacgggcctaat

SEQ ID NO: 30314 - DNA, 21 bp, synthetic construct
  source 1..21: mol_type = other DNA; mol_type = other DNA
tattcaaaaaacaatttcaac

SEQ ID NO: 30315 - DNA, 21 bp, synthetic construct
  source 1..21: mol_type = other DNA; mol_type = other DNA
agctgcgattcaggaaaggct

SEQ ID NO: 30316 - DNA, 21 bp, synthetic construct
  source 1..21: mol_type = other DNA; mol_type = other DNA
tactggtcaggtatgcaagag

SEQ ID NO: 30317 - DNA, 21 bp, synthetic construct
  source 1..21: mol_type = other DNA; mol_type = other DNA
aggggccatgatgtctttcca

SEQ ID NO: 30318 - DNA, 21 bp, synthetic construct
  source 1..21: mol_type = other DNA; mol_type = other DNA
tatgtgcgtagccaaaattta

SEQ ID NO: 30319 - DNA, 21 bp, synthetic construct
  source 1..21: mol_type = other DNA; mol_type = other DNA
ttcagtagaaccggatacaac

SEQ ID NO: 30320 - DNA, 21 bp, synthetic construct
  source 1..21: mol_type = other DNA; mol_type = other DNA
ctgatcaaaccgtgccttact

SEQ ID NO: 30321 - DNA, 21 bp, synthetic construct
  source 1..21: mol_type = other DNA; mol_type = other DNA
atgagagatggcacttctagc

SEQ ID NO: 30322 - DNA, 21 bp, synthetic construct
  source 1..21: mol_type = other DNA; mol_type = other DNA
tatgcacgacagggggttaat

SEQ ID NO: 30323 - DNA, 21 bp, synthetic construct
  source 1..21: mol_type = other DNA; mol_type = other DNA
ttttttacaggtacgttcgat

SEQ ID NO: 30324 - DNA, 21 bp, synthetic construct
  source 1..21: mol_type = other DNA; mol_type = other DNA
gtgatgtatgactcctaccca

SEQ ID NO: 30325 - DNA, 21 bp, synthetic construct
  source 1..21: mol_type = other DNA; mol_type = other DNA
tactttaccggcttacataat

SEQ ID NO: 30326 - DNA, 21 bp, synthetic construct
  source 1..21: mol_type = other DNA; mol_type = other DNA
aaagacgactacactcgtttt

SEQ ID NO: 30327 - DNA, 21 bp, synthetic construct
  source 1..21: mol_type = other DNA; mol_type = other DNA
ccgatgccagaccgttcgtgg

SEQ ID NO: 30328 - DNA, 21 bp, synthetic construct
  source 1..21: mol_type = other DNA; mol_type = other DNA
tatcatcgagcgggcctcgat

SEQ ID NO: 30329 - DNA, 21 bp, synthetic construct
  source 1..21: mol_type = other DNA; mol_type = other DNA
cgggacgatagttctagctgg

SEQ ID NO: 30330 - DNA, 21 bp, synthetic construct
  source 1..21: mol_type = other DNA; mol_type = other DNA
gatctccgggaccgcgcatgg

SEQ ID NO: 30331 - DNA, 21 bp, synthetic construct
  source 1..21: mol_type = other DNA; mol_type = other DNA
tatttttcaggcatgactgag

SEQ ID NO: 30332 - DNA, 21 bp, synthetic construct
  source 1..21: mol_type = other DNA; mol_type = other DNA
tacacgtctagtaatggcgta

SEQ ID NO: 30333 - DNA, 21 bp, synthetic construct
  source 1..21: mol_type = other DNA; mol_type = other DNA
tattggggaggcgtactggag

SEQ ID NO: 30334 - DNA, 21 bp, synthetic construct
  source 1..21: mol_type = other DNA; mol_type = other DNA
ggcgttgaacacgtgaggtgg

SEQ ID NO: 30335 - DNA, 21 bp, synthetic construct
  source 1..21: mol_type = other DNA; mol_type = other DNA
ggggacggttatagtaaatgg

SEQ ID NO: 30336 - DNA, 21 bp, synthetic construct
  source 1..21: mol_type = other DNA; mol_type = other DNA
atcatgagcacgaacggtatt

SEQ ID NO: 30337 - DNA, 21 bp, synthetic construct
  source 1..21: mol_type = other DNA; mol_type = other DNA
ggaccaggcgcgggttgcaat

SEQ ID NO: 30338 - DNA, 21 bp, synthetic construct
  source 1..21: mol_type = other DNA; mol_type = other DNA
tactttacgggttctcgagaa

SEQ ID NO: 30339 - DNA, 21 bp, synthetic construct
  source 1..21: mol_type = other DNA; mol_type = other DNA
ctggcgagaagtggttacgat

SEQ ID NO: 30340 - DNA, 21 bp, synthetic construct
  source 1..21: mol_type = other DNA; mol_type = other DNA
gtctggtcaagtaacggtgta

SEQ ID NO: 30341 - DNA, 21 bp, synthetic construct
  source 1..21: mol_type = other DNA; mol_type = other DNA
tatagtaagataggaaaggat

SEQ ID NO: 30342 - DNA, 21 bp, synthetic construct
  source 1..21: mol_type = other DNA; mol_type = other DNA
gatttgaattcagctaaatgg

SEQ ID NO: 30343 - DNA, 21 bp, synthetic construct
  source 1..21: mol_type = other DNA; mol_type = other DNA
gttagcactcatatgtgcgct

SEQ ID NO: 30344 - DNA, 21 bp, synthetic construct
  source 1..21: mol_type = other DNA; mol_type = other DNA
agagatggagaaagtgcatgg

SEQ ID NO: 30345 - DNA, 21 bp, synthetic construct
  source 1..21: mol_type = other DNA; mol_type = other DNA
gcacaaagtaccaatggtgtt

SEQ ID NO: 30346 - DNA, 21 bp, synthetic construct
  source 1..21: mol_type = other DNA; mol_type = other DNA
agggaaggcacctctctgtgg

SEQ ID NO: 30347 - DNA, 21 bp, synthetic construct
  source 1..21: mol_type = other DNA; mol_type = other DNA
tgtaagagcgactcaaaagtg

SEQ ID NO: 30348 - DNA, 21 bp, synthetic construct
  source 1..21: mol_type = other DNA; mol_type = other DNA
tatagtaagatcggctgggat

SEQ ID NO: 30349 - DNA, 21 bp, synthetic construct
  source 1..21: mol_type = other DNA; mol_type = other DNA
tatacaaggttgaacccaatg

SEQ ID NO: 30350 - DNA, 21 bp, synthetic construct
  source 1..21: mol_type = other DNA; mol_type = other DNA
atggccggaacttcatgtctc

SEQ ID NO: 30351 - DNA, 21 bp, synthetic construct
  source 1..21: mol_type = other DNA; mol_type = other DNA
agagaagaatttacgacctgg

SEQ ID NO: 30352 - DNA, 21 bp, synthetic construct
  source 1..21: mol_type = other DNA; mol_type = other DNA
tgtaagcctggctcaccgatg

SEQ ID NO: 30353 - DNA, 21 bp, synthetic construct
  source 1..21: mol_type = other DNA; mol_type = other DNA
aaggacgactatgtcttcttc

SEQ ID NO: 30354 - DNA, 21 bp, synthetic construct
  source 1..21: mol_type = other DNA; mol_type = other DNA
ttcagcaggataggtgataac

SEQ ID NO: 30355 - DNA, 21 bp, synthetic construct
  source 1..21: mol_type = other DNA; mol_type = other DNA
aaggatgactggaatacatgg

SEQ ID NO: 30356 - DNA, 21 bp, synthetic construct
  source 1..21: mol_type = other DNA; mol_type = other DNA
ttgcacaggatgtcccctgat

SEQ ID NO: 30357 - DNA, 21 bp, synthetic construct
  source 1..21: mol_type = other DNA; mol_type = other DNA
tataccaagctagattataat

SEQ ID NO: 30358 - DNA, 21 bp, synthetic construct
  source 1..21: mol_type = other DNA; mol_type = other DNA
tatgtcaagttgcaaccgaat

SEQ ID NO: 30359 - DNA, 21 bp, synthetic construct
  source 1..21: mol_type = other DNA; mol_type = other DNA
tattacactggtcgattggaa

SEQ ID NO: 30360 - DNA, 21 bp, synthetic construct
  source 1..21: mol_type = other DNA; mol_type = other DNA
cattggagtacgaatggtatt

SEQ ID NO: 30361 - DNA, 21 bp, synthetic construct
  source 1..21: mol_type = other DNA; mol_type = other DNA
tacagtaagaatggatataat

SEQ ID NO: 30362 - DNA, 21 bp, synthetic construct
  source 1..21: mol_type = other DNA; mol_type = other DNA
tacgcccgcctaggggtcaat

SEQ ID NO: 30363 - DNA, 21 bp, synthetic construct
  source 1..21: mol_type = other DNA; mol_type = other DNA
gggattagaaatgtaatgtac

SEQ ID NO: 30364 - DNA, 21 bp, synthetic construct
  source 1..21: mol_type = other DNA; mol_type = other DNA
cgagacgaatttaacagtttt

SEQ ID NO: 30365 - DNA, 21 bp, synthetic construct
  source 1..21: mol_type = other DNA; mol_type = other DNA
agaggagactcccggtcatgg

SEQ ID NO: 30366 - DNA, 21 bp, synthetic construct
  source 1..21: mol_type = other DNA; mol_type = other DNA
tatagtagacaaaacgtaaac

SEQ ID NO: 30367 - DNA, 21 bp, synthetic construct
  source 1..21: mol_type = other DNA; mol_type = other DNA
ttgtcgcgaattgcaaataac

SEQ ID NO: 30368 - DNA, 21 bp, synthetic construct
  source 1..21: mol_type = other DNA; mol_type = other DNA
tatagccgggctaacacaaac

SEQ ID NO: 30369 - DNA, 21 bp, synthetic construct
  source 1..21: mol_type = other DNA; mol_type = other DNA
tgccctcgcgaaaatgacggg

SEQ ID NO: 30370 - DNA, 21 bp, synthetic construct
  source 1..21: mol_type = other DNA; mol_type = other DNA
tactcgaagtggaataccaat

SEQ ID NO: 30371 - DNA, 21 bp, synthetic construct
  source 1..21: mol_type = other DNA; mol_type = other DNA
tgggtccgaagtcagccagga

SEQ ID NO: 30372 - DNA, 21 bp, synthetic construct
  source 1..21: mol_type = other DNA; mol_type = other DNA
tactttagcggggtaactgta

SEQ ID NO: 30373 - DNA, 21 bp, synthetic construct
  source 1..21: mol_type = other DNA; mol_type = other DNA
tatttttcgggtaaaccggag

SEQ ID NO: 30374 - DNA, 21 bp, synthetic construct
  source 1..21: mol_type = other DNA; mol_type = other DNA
tacataaaaagccagacctgc

SEQ ID NO: 30375 - DNA, 21 bp, synthetic construct
  source 1..21: mol_type = other DNA; mol_type = other DNA
atcacatcatctaatggaata

SEQ ID NO: 30376 - DNA, 21 bp, synthetic construct
  source 1..21: mol_type = other DNA; mol_type = other DNA
tatgtaaggagtgacagcact

SEQ ID NO: 30377 - DNA, 21 bp, synthetic construct
  source 1..21: mol_type = other DNA; mol_type = other DNA
tatgctagagcgggccttaac

SEQ ID NO: 30378 - DNA, 21 bp, synthetic construct
  source 1..21: mol_type = other DNA; mol_type = other DNA
tggtggagcggcgtcacggaa

SEQ ID NO: 30379 - DNA, 21 bp, synthetic construct
  source 1..21: mol_type = other DNA; mol_type = other DNA
gacgggtcgagtcgctcctgg

SEQ ID NO: 30380 - DNA, 21 bp, synthetic construct
  source 1..21: mol_type = other DNA; mol_type = other DNA
cgcgaggataccatctattgg

SEQ ID NO: 30381 - DNA, 21 bp, synthetic construct
  source 1..21: mol_type = other DNA; mol_type = other DNA
tacgcgcggaacggagccaac

SEQ ID NO: 30382 - DNA, 21 bp, synthetic construct
  source 1..21: mol_type = other DNA; mol_type = other DNA
tacttcagcggcgtgacccca

SEQ ID NO: 30383 - DNA, 21 bp, synthetic construct
  source 1..21: mol_type = other DNA; mol_type = other DNA
agtgatggggtctccaagtgg

SEQ ID NO: 30384 - DNA, 21 bp, synthetic construct
  source 1..21: mol_type = other DNA; mol_type = other DNA
atacaatcaagtaatggcgtt

SEQ ID NO: 30385 - DNA, 21 bp, synthetic construct
  source 1..21: mol_type = other DNA; mol_type = other DNA
tactggagcggcaccatagaa

SEQ ID NO: 30386 - DNA, 21 bp, synthetic construct
  source 1..21: mol_type = other DNA; mol_type = other DNA
cgcgaatacaacgtgtatccc

SEQ ID NO: 30387 - DNA, 21 bp, synthetic construct
  source 1..21: mol_type = other DNA; mol_type = other DNA
ataggtagtaaaggttgggac

SEQ ID NO: 30388 - DNA, 21 bp, synthetic construct
  source 1..21: mol_type = other DNA; mol_type = other DNA
tatagtcgttcgggactaaat

SEQ ID NO: 30389 - DNA, 21 bp, synthetic construct
  source 1..21: mol_type = other DNA; mol_type = other DNA
tgcaagcggacctcgggcgag

SEQ ID NO: 30390 - DNA, 21 bp, synthetic construct
  source 1..21: mol_type = other DNA; mol_type = other DNA
aggacaagagactcttaccca

SEQ ID NO: 30391 - DNA, 21 bp, synthetic construct
  source 1..21: mol_type = other DNA; mol_type = other DNA
ctaagcagagttgcgttcgac

SEQ ID NO: 30392 - DNA, 21 bp, synthetic construct
  source 1..21: mol_type = other DNA; mol_type = other DNA
ggctccattggtgctctatgg

SEQ ID NO: 30393 - DNA, 21 bp, synthetic construct
  source 1..21: mol_type = other DNA; mol_type = other DNA
tactcaaaatcgaatcccaac

SEQ ID NO: 30394 - DNA, 21 bp, synthetic construct
  source 1..21: mol_type = other DNA; mol_type = other DNA
tattggacagggatgatggag

SEQ ID NO: 30395 - DNA, 21 bp, synthetic construct
  source 1..21: mol_type = other DNA; mol_type = other DNA
gtagcgctaatgggaattggc

SEQ ID NO: 30396 - DNA, 21 bp, synthetic construct
  source 1..21: mol_type = other DNA; mol_type = other DNA
tatagtcgattaaacatgaat

SEQ ID NO: 30397 - DNA, 21 bp, synthetic construct
  source 1..21: mol_type = other DNA; mol_type = other DNA
taccaccgacagagtgataac

SEQ ID NO: 30398 - DNA, 21 bp, synthetic construct
  source 1..21: mol_type = other DNA; mol_type = other DNA
tattggagtggtacgactgac

SEQ ID NO: 30399 - DNA, 21 bp, synthetic construct
  source 1..21: mol_type = other DNA; mol_type = other DNA
tacgaacccggctgcgctgag

SEQ ID NO: 30400 - DNA, 21 bp, synthetic construct
  source 1..21: mol_type = other DNA; mol_type = other DNA
tgcaagttactcgggaaggac

SEQ ID NO: 30401 - DNA, 21 bp, synthetic construct
  source 1..21: mol_type = other DNA; mol_type = other DNA
ctccaccgtctggcgtcctct

SEQ ID NO: 30402 - DNA, 21 bp, synthetic construct
  source 1..21: mol_type = other DNA; mol_type = other DNA
tacctaaaaagccaaacagtg

SEQ ID NO: 30403 - DNA, 21 bp, synthetic construct
  source 1..21: mol_type = other DNA; mol_type = other DNA
tatttaaaatcggatgcctat

SEQ ID NO: 30404 - DNA, 21 bp, synthetic construct
  source 1..21: mol_type = other DNA; mol_type = other DNA
tacgctaaggcgggtgctaac

SEQ ID NO: 30405 - DNA, 21 bp, synthetic construct
  source 1..21: mol_type = other DNA; mol_type = other DNA
cacgagtccacgaatggcata

SEQ ID NO: 30406 - DNA, 21 bp, synthetic construct
  source 1..21: mol_type = other DNA; mol_type = other DNA
tatgtccgaagcgaccaaact

SEQ ID NO: 30407 - DNA, 21 bp, synthetic construct
  source 1..21: mol_type = other DNA; mol_type = other DNA
tgcaagagtaacaacgagccc

SEQ ID NO: 30408 - DNA, 21 bp, synthetic construct
  source 1..21: mol_type = other DNA; mol_type = other DNA
tattcgaagcataatccaaat

SEQ ID NO: 30409 - DNA, 21 bp, synthetic construct
  source 1..21: mol_type = other DNA; mol_type = other DNA
ttcgccagcaccaacggggtc

SEQ ID NO: 30410 - DNA, 21 bp, synthetic construct
  source 1..21: mol_type = other DNA; mol_type = other DNA
ttaaaagacggtacccctgcg

SEQ ID NO: 30411 - DNA, 21 bp, synthetic construct
  source 1..21: mol_type = other DNA; mol_type = other DNA
tgtcgtcccccggaggtagag

SEQ ID NO: 30412 - DNA, 21 bp, synthetic construct
  source 1..21: mol_type = other DNA; mol_type = other DNA
tgtaagcctgaatgtggaggt

SEQ ID NO: 30413 - DNA, 21 bp, synthetic construct
  source 1..21: mol_type = other DNA; mol_type = other DNA
accccttccacaatctatttc

SEQ ID NO: 30414 - DNA, 21 bp, synthetic construct
  source 1..21: mol_type = other DNA; mol_type = other DNA
tattggagcggaaagctcgaa

SEQ ID NO: 30415 - DNA, 21 bp, synthetic construct
  source 1..21: mol_type = other DNA; mol_type = other DNA
tatgcccgtatcggattcaat

SEQ ID NO: 30416 - DNA, 21 bp, synthetic construct
  source 1..21: mol_type = other DNA; mol_type = other DNA
aaactgccgaactacgggtat

SEQ ID NO: 30417 - DNA, 21 bp, synthetic construct
  source 1..21: mol_type = other DNA; mol_type = other DNA
ctggctagcgcctgtctctct

SEQ ID NO: 30418 - DNA, 21 bp, synthetic construct
  source 1..21: mol_type = other DNA; mol_type = other DNA
tacttctcaggtactagaaca

SEQ ID NO: 30419 - DNA, 21 bp, synthetic construct
  source 1..21: mol_type = other DNA; mol_type = other DNA
ttttgggcaggaattcgtgaa

SEQ ID NO: 30420 - DNA, 21 bp, synthetic construct
  source 1..21: mol_type = other DNA; mol_type = other DNA
agaaatgaatatagcacatat

SEQ ID NO: 30421 - DNA, 21 bp, synthetic construct
  source 1..21: mol_type = other DNA; mol_type = other DNA
tatagtaagtggaatgacaac

SEQ ID NO: 30422 - DNA, 21 bp, synthetic construct
  source 1..21: mol_type = other DNA; mol_type = other DNA
tatagcaaacatggggccaat

SEQ ID NO: 30423 - DNA, 21 bp, synthetic construct
  source 1..21: mol_type = other DNA; mol_type = other DNA
tacttcagtggtatccaaccc

SEQ ID NO: 30424 - DNA, 21 bp, synthetic construct
  source 1..21: mol_type = other DNA; mol_type = other DNA
tattttaccggtagaacctct

SEQ ID NO: 30425 - DNA, 21 bp, synthetic construct
  source 1..21: mol_type = other DNA; mol_type = other DNA
aggatggaatcggtaatctgg

SEQ ID NO: 30426 - DNA, 21 bp, synthetic construct
  source 1..21: mol_type = other DNA; mol_type = other DNA
acggtgtacgattctttcgct

SEQ ID NO: 30427 - DNA, 21 bp, synthetic construct
  source 1..21: mol_type = other DNA; mol_type = other DNA
atgaccaccacttcatgtttg

SEQ ID NO: 30428 - DNA, 21 bp, synthetic construct
  source 1..21: mol_type = other DNA; mol_type = other DNA
tataccagactcgataatatg

SEQ ID NO: 30429 - DNA, 21 bp, synthetic construct
  source 1..21: mol_type = other DNA; mol_type = other DNA
tactggcagggaaaaattgat

SEQ ID NO: 30430 - DNA, 21 bp, synthetic construct
  source 1..21: mol_type = other DNA; mol_type = other DNA
tttttttcaggacgcatcgag

SEQ ID NO: 30431 - DNA, 21 bp, synthetic construct
  source 1..21: mol_type = other DNA; mol_type = other DNA
tttgcacgcactggcatgaac

SEQ ID NO: 30432 - DNA, 21 bp, synthetic construct
  source 1..21: mol_type = other DNA; mol_type = other DNA
tacgcgcgacagggtgctaac

SEQ ID NO: 30433 - DNA, 21 bp, synthetic construct
  source 1..21: mol_type = other DNA; mol_type = other DNA
ggacgcccagggtgtccattt

SEQ ID NO: 30434 - DNA, 21 bp, synthetic construct
  source 1..21: mol_type = other DNA; mol_type = other DNA
attggttttgtctgctcagaa

SEQ ID NO: 30435 - DNA, 21 bp, synthetic construct
  source 1..21: mol_type = other DNA; mol_type = other DNA
cgtgatgaatttaccaagttt

SEQ ID NO: 30436 - DNA, 21 bp, synthetic construct
  source 1..21: mol_type = other DNA; mol_type = other DNA
tgcaagccgaatccagcgcca

SEQ ID NO: 30437 - DNA, 21 bp, synthetic construct
  source 1..21: mol_type = other DNA; mol_type = other DNA
tacagccgtgctagcgataac

SEQ ID NO: 30438 - DNA, 21 bp, synthetic construct
  source 1..21: mol_type = other DNA; mol_type = other DNA
tacgccaggggcggttacaac

SEQ ID NO: 30439 - DNA, 21 bp, synthetic construct
  source 1..21: mol_type = other DNA; mol_type = other DNA
tacttttcgggccagcatcat

SEQ ID NO: 30440 - DNA, 21 bp, synthetic construct
  source 1..21: mol_type = other DNA; mol_type = other DNA
tactccaagtggaacgccaat

SEQ ID NO: 30441 - DNA, 21 bp, synthetic construct
  source 1..21: mol_type = other DNA; mol_type = other DNA
tactcccggataaatcccaac

SEQ ID NO: 30442 - DNA, 21 bp, synthetic construct
  source 1..21: mol_type = other DNA; mol_type = other DNA
tatagtcgcctgaatccgaat

SEQ ID NO: 30443 - DNA, 21 bp, synthetic construct
  source 1..21: mol_type = other DNA; mol_type = other DNA
tgtaaatcatccaagcaggat

SEQ ID NO: 30444 - DNA, 21 bp, synthetic construct
  source 1..21: mol_type = other DNA; mol_type = other DNA
aaagacgagtatctcactttc

SEQ ID NO: 30445 - DNA, 21 bp, synthetic construct
  source 1..21: mol_type = other DNA; mol_type = other DNA
tatttcagcggaatcattcaa

SEQ ID NO: 30446 - DNA, 21 bp, synthetic construct
  source 1..21: mol_type = other DNA; mol_type = other DNA
taccacaaataccaggaaaat

SEQ ID NO: 30447 - DNA, 21 bp, synthetic construct
  source 1..21: mol_type = other DNA; mol_type = other DNA
gaacgttacggtttatgtgct

SEQ ID NO: 30448 - DNA, 21 bp, synthetic construct
  source 1..21: mol_type = other DNA; mol_type = other DNA
actacttcaacgaacgggatt

SEQ ID NO: 30449 - DNA, 21 bp, synthetic construct
  source 1..21: mol_type = other DNA; mol_type = other DNA
tactcgcgggcgggtgataac

SEQ ID NO: 30450 - DNA, 21 bp, synthetic construct
  source 1..21: mol_type = other DNA; mol_type = other DNA
gtaatgcgagacagggggtgg

SEQ ID NO: 30451 - DNA, 21 bp, synthetic construct
  source 1..21: mol_type = other DNA; mol_type = other DNA
tacagccgcgtaggtcacaat

SEQ ID NO: 30452 - DNA, 21 bp, synthetic construct
  source 1..21: mol_type = other DNA; mol_type = other DNA
ttcagtagaacgggagccaac

SEQ ID NO: 30453 - DNA, 21 bp, synthetic construct
  source 1..21: mol_type = other DNA
tattacagcggcatacatagt

SEQ ID NO: 30454 - DNA, 21 bp, synthetic construct
  source 1..21: mol_type = other DNA
tacagtcgcgtcggaggtaat

SEQ ID NO: 30455 - DNA, 21 bp, synthetic construct
  source 1..21: mol_type = other DNA; mol_type = other DNA
tactgggagggggttaaaagt

SEQ ID NO: 30456 - DNA, 21 bp, synthetic construct
  source 1..21: mol_type = other DNA; mol_type = other DNA
tattcacgactgggtaacaat

SEQ ID NO: 30457 - DNA, 21 bp, synthetic construct
  source 1..21: mol_type = other DNA; mol_type = other DNA
acactcagcaccaatggtgtg

SEQ ID NO: 30458 - DNA, 21 bp, synthetic construct
  source 1..21: mol_type = other DNA; mol_type = other DNA
tttagtcgtatgggcccaaac

SEQ ID NO: 30459 - DNA, 21 bp, synthetic construct
  source 1..21: mol_type = other DNA; mol_type = other DNA
tatgcgcgcttgagcccgatt

SEQ ID NO: 30460 - DNA, 21 bp, synthetic construct
  source 1..21: mol_type = other DNA; mol_type = other DNA
gcccatcgactattgcccagt

SEQ ID NO: 30461 - DNA, 21 bp, synthetic construct
  source 1..21: mol_type = other DNA; mol_type = other DNA
tacagtcggactaatgttaat

SEQ ID NO: 30462 - DNA, 21 bp, synthetic construct
  source 1..21: mol_type = other DNA; mol_type = other DNA
ttttttacaggtaccgtatcg

SEQ ID NO: 30463 - DNA, 21 bp, synthetic construct
  source 1..21: mol_type = other DNA; mol_type = other DNA
tacgccaaggcaggaaacaat

SEQ ID NO: 30464 - DNA, 21 bp, synthetic construct
  source 1..21: mol_type = other DNA; mol_type = other DNA
tatagtaggttacaagcgata

SEQ ID NO: 30465 - DNA, 21 bp, synthetic construct
  source 1..21: mol_type = other DNA; mol_type = other DNA
tactccagacttcaaatgaat

SEQ ID NO: 30466 - DNA, 21 bp, synthetic construct
  source 1..21: mol_type = other DNA; mol_type = other DNA
cgcgaggaaaatgtttactgg

SEQ ID NO: 30467 - DNA, 21 bp, synthetic construct
  source 1..21: mol_type = other DNA; mol_type = other DNA
gctaacgactacatgagctac

SEQ ID NO: 30468 - DNA, 21 bp, synthetic construct
  source 1..21: mol_type = other DNA; mol_type = other DNA
tgggcaaaaagcggcccgaac

SEQ ID NO: 30469 - DNA, 21 bp, synthetic construct
  source 1..21: mol_type = other DNA; mol_type = other DNA
tactcgaagtggaacgagaac

SEQ ID NO: 30470 - DNA, 21 bp, synthetic construct
  source 1..21: mol_type = other DNA; mol_type = other DNA
tgtaagccaggatctagtggc

SEQ ID NO: 30471 - DNA, 21 bp, synthetic construct
  source 1..21: mol_type = other DNA; mol_type = other DNA
tgtcggccccaaatggcctcg

SEQ ID NO: 30472 - DNA, 21 bp, synthetic construct
  source 1..21: mol_type = other DNA; mol_type = other DNA
tactggtcaggggtacaggtg

SEQ ID NO: 30473 - DNA, 21 bp, synthetic construct
  source 1..21: mol_type = other DNA; mol_type = other DNA
acggatggaacctccctgtgg

SEQ ID NO: 30474 - DNA, 21 bp, synthetic construct
  source 1..21: mol_type = other DNA; mol_type = other DNA
tgtcagagcgagggcaggact

SEQ ID NO: 30475 - DNA, 21 bp, synthetic construct
  source 1..21: mol_type = other DNA; mol_type = other DNA
tattggtccggagtcggagaa

SEQ ID NO: 30476 - DNA, 21 bp, synthetic construct
  source 1..21: mol_type = other DNA; mol_type = other DNA
acaagggagggggacgctccc

SEQ ID NO: 30477 - DNA, 21 bp, synthetic construct
  source 1..21: mol_type = other DNA; mol_type = other DNA
cgcgatgggatctcagcatgg

SEQ ID NO: 30478 - DNA, 21 bp, synthetic construct
  source 1..21: mol_type = other DNA; mol_type = other DNA
tattggtcgggggtgggtgca

SEQ ID NO: 30479 - DNA, 21 bp, synthetic construct
  source 1..21: mol_type = other DNA; mol_type = other DNA
cctatgccggataggagctgg

SEQ ID NO: 30480 - DNA, 21 bp, synthetic construct
  source 1..21: mol_type = other DNA; mol_type = other DNA
tatttcagtggccagatcatg

SEQ ID NO: 30481 - DNA, 21 bp, synthetic construct
  source 1..21: mol_type = other DNA; mol_type = other DNA
ctgcactcaaccaacggaata

SEQ ID NO: 30482 - DNA, 21 bp, synthetic construct
  source 1..21: mol_type = other DNA; mol_type = other DNA
agagatggaaattctcggtgg

SEQ ID NO: 30483 - DNA, 21 bp, synthetic construct
  source 1..21: mol_type = other DNA; mol_type = other DNA
tggtttagcgggagagtagag

SEQ ID NO: 30484 - DNA, 21 bp, synthetic construct
  source 1..21: mol_type = other DNA; mol_type = other DNA
tgcaaagcaaacccgcccgaa

SEQ ID NO: 30485 - DNA, 21 bp, synthetic construct
  source 1..21: mol_type = other DNA; mol_type = other DNA
cattggagcacaaacggagta

SEQ ID NO: 30486 - DNA, 21 bp, synthetic construct
  source 1..21: mol_type = other DNA; mol_type = other DNA
tggttgcctatgtgtaaagcc

SEQ ID NO: 30487 - DNA, 21 bp, synthetic construct
  source 1..21: mol_type = other DNA; mol_type = other DNA
tatagccgtcaaggaatcaac

SEQ ID NO: 30488 - DNA, 21 bp, synthetic construct
  source 1..21: mol_type = other DNA; mol_type = other DNA
ttcagccgattaggtgcaaac

SEQ ID NO: 30489 - DNA, 21 bp, synthetic construct
  source 1..21: mol_type = other DNA; mol_type = other DNA
tattggtcggctgtgcctgaa

SEQ ID NO: 30490 - DNA, 21 bp, synthetic construct
  source 1..21: mol_type = other DNA; mol_type = other DNA
ggaggtccgggttcgttttgg

SEQ ID NO: 30491 - DNA, 21 bp, synthetic construct
  source 1..21: mol_type = other DNA; mol_type = other DNA
tattccaaagggaactgcaac

SEQ ID NO: 30492 - DNA, 21 bp, synthetic construct
  source 1..21: mol_type = other DNA; mol_type = other DNA
tgtaaggacccatgctgtaca

SEQ ID NO: 30493 - DNA, 21 bp, synthetic construct
  source 1..21: mol_type = other DNA; mol_type = other DNA
tacagtcggatcaatttcaat

SEQ ID NO: 30494 - DNA, 21 bp, synthetic construct
  source 1..21: mol_type = other DNA; mol_type = other DNA
tggtggagccaggtcaaagag

SEQ ID NO: 30495 - DNA, 21 bp, synthetic construct
  source 1..21: mol_type = other DNA; mol_type = other DNA
accttcagcactaacggtatt

SEQ ID NO: 30496 - DNA, 21 bp, synthetic construct
  source 1..21: mol_type = other DNA; mol_type = other DNA
gaactagatagcagggactgg

SEQ ID NO: 30497 - DNA, 21 bp, synthetic construct
  source 1..21: mol_type = other DNA; mol_type = other DNA
atagcatacgatgcatatccc

SEQ ID NO: 30498 - DNA, 21 bp, synthetic construct
  source 1..21: mol_type = other DNA; mol_type = other DNA
agtgcgtctacaaatggcatc

SEQ ID NO: 30499 - DNA, 21 bp, synthetic construct
  source 1..21: mol_type = other DNA; mol_type = other DNA
tatagtaggatgggcgtgaat

SEQ ID NO: 30500 - DNA, 21 bp, synthetic construct
  source 1..21: mol_type = other DNA; mol_type = other DNA
tatgccaaaatggggtggaat

SEQ ID NO: 30501 - DNA, 21 bp, synthetic construct
  source 1..21: mol_type = other DNA; mol_type = other DNA
tgtatggagcgaaaacccgag

SEQ ID NO: 30502 - DNA, 21 bp, synthetic construct
  source 1..21: mol_type = other DNA; mol_type = other DNA
tggttcagtggcaaaatagat

SEQ ID NO: 30503 - DNA, 21 bp, synthetic construct
  source 1..21: mol_type = other DNA; mol_type = other DNA
tacgccaggggaaaccataac

SEQ ID NO: 30504 - DNA, 21 bp, synthetic construct
  source 1..21: mol_type = other DNA; mol_type = other DNA
tactggtcaggtactgtcgat

SEQ ID NO: 30505 - DNA, 21 bp, synthetic construct
  source 1..21: mol_type = other DNA
tcaggagaaagtcgcacttgg

SEQ ID NO: 30506 - DNA, 21 bp, synthetic construct
  source 1..21: mol_type = other DNA
tgggtccggagcgacgtgaaa

SEQ ID NO: 30507 - DNA, 21 bp, synthetic construct
  source 1..21: mol_type = other DNA
tactttcaggggaggattgat

SEQ ID NO: 30508 - DNA, 21 bp, synthetic construct
  source 1..21: mol_type = other DNA
tattgggcgggtgtgcaagaa

SEQ ID NO: 30509 - DNA, 21 bp, synthetic construct
  source 1..21: mol_type = other DNA; mol_type = other DNA
gtgccatatgagggcatagga

SEQ ID NO: 30510 - DNA, 21 bp, synthetic construct
  source 1..21: mol_type = other DNA; mol_type = other DNA
tatgttaaaagccaagtgatt

SEQ ID NO: 30511 - DNA, 21 bp, synthetic construct
  source 1..21: mol_type = other DNA; mol_type = other DNA
ctaacctacgacgcttacgag

SEQ ID NO: 30512 - DNA, 21 bp, synthetic construct
  source 1..21: mol_type = other DNA; mol_type = other DNA
tatttcaccaaacagatcgat

SEQ ID NO: 30513 - DNA, 21 bp, synthetic construct
  source 1..21: mol_type = other DNA; mol_type = other DNA
tacttcagtgggcgcccaaac

SEQ ID NO: 30514 - DNA, 21 bp, synthetic construct
  source 1..21: mol_type = other DNA; mol_type = other DNA
agggattctacccacggaatt

SEQ ID NO: 30515 - DNA, 21 bp, synthetic construct
  source 1..21: mol_type = other DNA; mol_type = other DNA
tacagccggttaaacactaac

SEQ ID NO: 30516 - DNA, 21 bp, synthetic construct
  source 1..21: mol_type = other DNA; mol_type = other DNA
tattcgaggttaaattttaat

SEQ ID NO: 30517 - DNA, 21 bp, synthetic construct
  source 1..21: mol_type = other DNA; mol_type = other DNA
tacttcagcgggcaggcggaa

SEQ ID NO: 30518 - DNA, 21 bp, synthetic construct
  source 1..21: mol_type = other DNA; mol_type = other DNA
aaagacgactttactcggtac

SEQ ID NO: 30519 - DNA, 21 bp, synthetic construct
  source 1..21: mol_type = other DNA; mol_type = other DNA
tatttcgccggcgaaagagat

SEQ ID NO: 30520 - DNA, 21 bp, synthetic construct
  source 1..21: mol_type = other DNA; mol_type = other DNA
tacgttaaatctgacaaggta

SEQ ID NO: 30521 - DNA, 21 bp, synthetic construct
  source 1..21: mol_type = other DNA; mol_type = other DNA
ctgagccgagtagcttttgac

SEQ ID NO: 30522 - DNA, 21 bp, synthetic construct
  source 1..21: mol_type = other DNA; mol_type = other DNA
ttctcaagacttggtcaaaat

SEQ ID NO: 30523 - DNA, 21 bp, synthetic construct
  source 1..21: mol_type = other DNA; mol_type = other DNA
tattggcaaggggtacgcgag

SEQ ID NO: 30524 - DNA, 21 bp, synthetic construct
  source 1..21: mol_type = other DNA; mol_type = other DNA
tactcacgggcaggccaaaac

SEQ ID NO: 30525 - DNA, 21 bp, synthetic construct
  source 1..21: mol_type = other DNA; mol_type = other DNA
tattacacgggagtgatcgaa

SEQ ID NO: 30526 - DNA, 21 bp, synthetic construct
  source 1..21: mol_type = other DNA; mol_type = other DNA
tcctgcaaagagcgtatgcca

SEQ ID NO: 30527 - DNA, 21 bp, synthetic construct
  source 1..21: mol_type = other DNA; mol_type = other DNA
tacgcccgacaaggtagcaat

SEQ ID NO: 30528 - DNA, 21 bp, synthetic construct
  source 1..21: mol_type = other DNA; mol_type = other DNA
tactggcaaggggttgtagag

SEQ ID NO: 30529 - DNA, 21 bp, synthetic construct
  source 1..21: mol_type = other DNA; mol_type = other DNA
tactgggggggtgtcttagaa

SEQ ID NO: 30530 - DNA, 21 bp, synthetic construct
  source 1..21: mol_type = other DNA; mol_type = other DNA
tattccaggtcgggagagaat

SEQ ID NO: 30531 - DNA, 21 bp, synthetic construct
  source 1..21: mol_type = other DNA; mol_type = other DNA
aggaacgagttctctggctat

SEQ ID NO: 30532 - DNA, 21 bp, synthetic construct
  source 1..21: mol_type = other DNA; mol_type = other DNA
tactcccgcagcggaataaac

SEQ ID NO: 30533 - DNA, 21 bp, synthetic construct
  source 1..21: mol_type = other DNA; mol_type = other DNA
tatttttcaggaatacagcca

SEQ ID NO: 30534 - DNA, 21 bp, synthetic construct
  source 1..21: mol_type = other DNA; mol_type = other DNA
ccttatgcccgtagcgcggac

SEQ ID NO: 30535 - DNA, 21 bp, synthetic construct
  source 1..21: mol_type = other DNA; mol_type = other DNA
tactcgagggcggggttcaat

SEQ ID NO: 30536 - DNA, 21 bp, synthetic construct
  source 1..21: mol_type = other DNA; mol_type = other DNA
tacagcaggataggtccgcaa

SEQ ID NO: 30537 - DNA, 21 bp, synthetic construct
  source 1..21: mol_type = other DNA; mol_type = other DNA
tatagtagagtcaacttaaat

SEQ ID NO: 30538 - DNA, 21 bp, synthetic construct
  source 1..21: mol_type = other DNA; mol_type = other DNA
tcgtactccactaacggcgtc

SEQ ID NO: 30539 - DNA, 21 bp, synthetic construct
  source 1..21: mol_type = other DNA; mol_type = other DNA
agaatgtcagcttcgaactgg

SEQ ID NO: 30540 - DNA, 21 bp, synthetic construct
  source 1..21: mol_type = other DNA; mol_type = other DNA
tgtaaaccgaaacagatcgag

SEQ ID NO: 30541 - DNA, 21 bp, synthetic construct
  source 1..21: mol_type = other DNA; mol_type = other DNA
tgcgctcccgactggagggag

SEQ ID NO: 30542 - DNA, 21 bp, synthetic construct
  source 1..21: mol_type = other DNA; mol_type = other DNA
tatcttaaatcgcaaggctat

SEQ ID NO: 30543 - DNA, 21 bp, synthetic construct
  source 1..21: mol_type = other DNA; mol_type = other DNA
tgcgctccgtatcaccacgaa

SEQ ID NO: 30544 - DNA, 21 bp, synthetic construct
  source 1..21: mol_type = other DNA; mol_type = other DNA
tacttcgccggtatcatatca

SEQ ID NO: 30545 - DNA, 21 bp, synthetic construct
  source 1..21: mol_type = other DNA; mol_type = other DNA
tatgcgagggctggaatgaac

SEQ ID NO: 30546 - DNA, 21 bp, synthetic construct
  source 1..21: mol_type = other DNA; mol_type = other DNA
gtgtgtaaaccttgtccaatt

SEQ ID NO: 30547 - DNA, 21 bp, synthetic construct
  source 1..21: mol_type = other DNA; mol_type = other DNA
gtgcctagctctgtcaagtgg

SEQ ID NO: 30548 - DNA, 21 bp, synthetic construct
  source 1..21: mol_type = other DNA; mol_type = other DNA
cggatggagagtagtgactgg

SEQ ID NO: 30549 - DNA, 21 bp, synthetic construct
  source 1..21: mol_type = other DNA; mol_type = other DNA
tacttctcgggcgaacatgac

SEQ ID NO: 30550 - DNA, 21 bp, synthetic construct
  source 1..21: mol_type = other DNA; mol_type = other DNA
cgtggggacttggtttacccc

SEQ ID NO: 30551 - DNA, 21 bp, synthetic construct
  source 1..21: mol_type = other DNA; mol_type = other DNA
tatgcacgtgggggaatgaat

SEQ ID NO: 30552 - DNA, 21 bp, synthetic construct
  source 1..21: mol_type = other DNA; mol_type = other DNA
tttttccatggaaagatagac

SEQ ID NO: 30553 - DNA, 21 bp, synthetic construct
  source 1..21: mol_type = other DNA; mol_type = other DNA
tacgcacgggtgggacacaat

SEQ ID NO: 30554 - DNA, 21 bp, synthetic construct
  source 1..21: mol_type = other DNA; mol_type = other DNA
gtcatgagttcacaaggatgg

SEQ ID NO: 30555 - DNA, 21 bp, synthetic construct
  source 1..21: mol_type = other DNA; mol_type = other DNA
tacattagtactaacggagtt

SEQ ID NO: 30556 - DNA, 21 bp, synthetic construct
  source 1..21: mol_type = other DNA; mol_type = other DNA
tattggactggaacgagcgct

SEQ ID NO: 30557 - DNA, 21 bp, synthetic construct
  source 1..21: mol_type = other DNA; mol_type = other DNA
gccgcctctactaacggggta

SEQ ID NO: 30558 - DNA, 21 bp, synthetic construct
  source 1..21: mol_type = other DNA; mol_type = other DNA
gggggcgagtcttctatctgg

SEQ ID NO: 30559 - DNA, 21 bp, synthetic construct
  source 1..21: mol_type = other DNA; mol_type = other DNA
tattattcaggagttaagagt

SEQ ID NO: 30560 - DNA, 21 bp, synthetic construct
  source 1..21: mol_type = other DNA; mol_type = other DNA
tatagcagactgggccataat

SEQ ID NO: 30561 - DNA, 21 bp, synthetic construct
  source 1..21: mol_type = other DNA; mol_type = other DNA
gtcatggacagcagggattgg

SEQ ID NO: 30562 - DNA, 21 bp, synthetic construct
  source 1..21: mol_type = other DNA; mol_type = other DNA
aattcgtccgcctgtaggact

SEQ ID NO: 30563 - DNA, 21 bp, synthetic construct
  source 1..21: mol_type = other DNA; mol_type = other DNA
tatttcacgggacaagcaagc

SEQ ID NO: 30564 - DNA, 21 bp, synthetic construct
  source 1..21: mol_type = other DNA; mol_type = other DNA
tatcataagtatcaggagaac

SEQ ID NO: 30565 - DNA, 21 bp, synthetic construct
  source 1..21: mol_type = other DNA; mol_type = other DNA
cgagatagcacaaatggtata

SEQ ID NO: 30566 - DNA, 21 bp, synthetic construct
  source 1..21: mol_type = other DNA; mol_type = other DNA
agggagggaacaagcgcttgg

SEQ ID NO: 30567 - DNA, 21 bp, synthetic construct
  source 1..21: mol_type = other DNA; mol_type = other DNA
tactggactggcatgatggaa

SEQ ID NO: 30568 - DNA, 21 bp, synthetic construct
  source 1..21: mol_type = other DNA; mol_type = other DNA
tgcaataaacccatgcacgca

SEQ ID NO: 30569 - DNA, 21 bp, synthetic construct
  source 1..21: mol_type = other DNA; mol_type = other DNA
gggggtcccggttcagcatgg

SEQ ID NO: 30570 - DNA, 21 bp, synthetic construct
  source 1..21: mol_type = other DNA; mol_type = other DNA
tgtaaggccgatagcaaggag

SEQ ID NO: 30571 - DNA, 21 bp, synthetic construct
  source 1..21: mol_type = other DNA; mol_type = other DNA
aatgccttagtagggcgagat

SEQ ID NO: 30572 - DNA, 21 bp, synthetic construct
  source 1..21: mol_type = other DNA; mol_type = other DNA
cttcacaggttgcatcctgat

SEQ ID NO: 30573 - DNA, 21 bp, synthetic construct
  source 1..21: mol_type = other DNA; mol_type = other DNA
ttagaaccaaaatgcaagggc

SEQ ID NO: 30574 - DNA, 21 bp, synthetic construct
  source 1..21: mol_type = other DNA; mol_type = other DNA
gtcgagggggttttatgtaga

SEQ ID NO: 30575 - DNA, 21 bp, synthetic construct
  source 1..21: mol_type = other DNA; mol_type = other DNA
tatttttcaggagtaactccc

SEQ ID NO: 30576 - DNA, 21 bp, synthetic construct
  source 1..21: mol_type = other DNA; mol_type = other DNA
tatttccatggtcaaatggac

SEQ ID NO: 30577 - DNA, 21 bp, synthetic construct
  source 1..21: mol_type = other DNA; mol_type = other DNA
cgggatagcactcatggggtt

SEQ ID NO: 30578 - DNA, 21 bp, synthetic construct
  source 1..21: mol_type = other DNA; mol_type = other DNA
agagaggaatcgtcccgttgg

SEQ ID NO: 30579 - DNA, 21 bp, synthetic construct
  source 1..21: mol_type = other DNA; mol_type = other DNA
ttttggtcgggtataccagcg

SEQ ID NO: 30580 - DNA, 21 bp, synthetic construct
  source 1..21: mol_type = other DNA; mol_type = other DNA
tattcgcgggtgggcccagtg

SEQ ID NO: 30581 - DNA, 21 bp, synthetic construct
  source 1..21: mol_type = other DNA; mol_type = other DNA
tacagccgcacaggttttaat

SEQ ID NO: 30582 - DNA, 21 bp, synthetic construct
  source 1..21: mol_type = other DNA; mol_type = other DNA
tgtaacttcaagggacccccc

SEQ ID NO: 30583 - DNA, 21 bp, synthetic construct
  source 1..21: mol_type = other DNA; mol_type = other DNA
gacccgtcatcttctaaatgg

SEQ ID NO: 30584 - DNA, 21 bp, synthetic construct
  source 1..21: mol_type = other DNA; mol_type = other DNA
agagaggatgccatccgttgg

SEQ ID NO: 30585 - DNA, 21 bp, synthetic construct
  source 1..21: mol_type = other DNA; mol_type = other DNA
tattcccgtaccaacatcaac

SEQ ID NO: 30586 - DNA, 21 bp, synthetic construct
  source 1..21: mol_type = other DNA; mol_type = other DNA
tatttcacagctgtaaaagag

SEQ ID NO: 30587 - DNA, 21 bp, synthetic construct
  source 1..21: mol_type = other DNA; mol_type = other DNA
tacagccgcctaaacagcaat

SEQ ID NO: 30588 - DNA, 21 bp, synthetic construct
  source 1..21: mol_type = other DNA; mol_type = other DNA
ggtggaattggaagtgcctgg

SEQ ID NO: 30589 - DNA, 21 bp, synthetic construct
  source 1..21: mol_type = other DNA; mol_type = other DNA
aaatacgaaagtagcgtctgg

SEQ ID NO: 30590 - DNA, 21 bp, synthetic construct
  source 1..21: mol_type = other DNA; mol_type = other DNA
tactggtcaggtactacggac

SEQ ID NO: 30591 - DNA, 21 bp, synthetic construct
  source 1..21: mol_type = other DNA; mol_type = other DNA
tacactggcacctcatgcctg

SEQ ID NO: 30592 - DNA, 21 bp, synthetic construct
  source 1..21: mol_type = other DNA; mol_type = other DNA
ccttacgcgcggagtcctagc

SEQ ID NO: 30593 - DNA, 21 bp, synthetic construct
  source 1..21: mol_type = other DNA; mol_type = other DNA
tactcgaggtcgaatgaaaac

SEQ ID NO: 30594 - DNA, 21 bp, synthetic construct
  source 1..21: mol_type = other DNA; mol_type = other DNA
tgtgcagcggagcgtctgggt

SEQ ID NO: 30595 - DNA, 21 bp, synthetic construct
  source 1..21: mol_type = other DNA; mol_type = other DNA
atagagagctacaatggaaga

SEQ ID NO: 30596 - DNA, 21 bp, synthetic construct
  source 1..21: mol_type = other DNA; mol_type = other DNA
taccaccgtctatcagatcac

SEQ ID NO: 30597 - DNA, 21 bp, synthetic construct
  source 1..21: mol_type = other DNA; mol_type = other DNA
tactgggcgggcgttagtgcc

SEQ ID NO: 30598 - DNA, 21 bp, synthetic construct
  source 1..21: mol_type = other DNA
tactggagcgccgtaccggag

SEQ ID NO: 30599 - DNA, 21 bp, synthetic construct
  source 1..21: mol_type = other DNA; mol_type = other DNA
tatgcgcgcggctcatgcgat

SEQ ID NO: 30600 - DNA, 21 bp, synthetic construct
  source 1..21: mol_type = other DNA; mol_type = other DNA
tacgcgcgaagcgggttcaat

SEQ ID NO: 30601 - DNA, 21 bp, synthetic construct
  source 1..21: mol_type = other DNA; mol_type = other DNA
atgtgggacggaaccatggcg

SEQ ID NO: 30602 - DNA, 21 bp, synthetic construct
  source 1..21: mol_type = other DNA; mol_type = other DNA
tacagcaaagtaggatgcaac

SEQ ID NO: 30603 - DNA, 21 bp, synthetic construct
  source 1..21: mol_type = other DNA; mol_type = other DNA
tattggtcacagattaaagat

SEQ ID NO: 30604 - DNA, 21 bp, synthetic construct
  source 1..21: mol_type = other DNA; mol_type = other DNA
tgcaaaccctacttacacgag

SEQ ID NO: 30605 - DNA, 21 bp, synthetic construct
  source 1..21: mol_type = other DNA; mol_type = other DNA
tacagccgatctggtgtcaat

SEQ ID NO: 30606 - DNA, 21 bp, synthetic construct
  source 1..21: mol_type = other DNA; mol_type = other DNA
tggttcagcggaaagatcgaa

SEQ ID NO: 30607 - DNA, 21 bp, synthetic construct
  source 1..21: mol_type = other DNA; mol_type = other DNA
tgcggcggtattggaaggagc

SEQ ID NO: 30608 - DNA, 21 bp, synthetic construct
  source 1..21: mol_type = other DNA; mol_type = other DNA
tactttcagggagtcaaatcc

SEQ ID NO: 30609 - DNA, 21 bp, synthetic construct
  source 1..21: mol_type = other DNA; mol_type = other DNA
tactctagactcgatcgcgac

SEQ ID NO: 30610 - DNA, 21 bp, synthetic construct
  source 1..21: mol_type = other DNA; mol_type = other DNA
tacagccgcaccggccaaaac

SEQ ID NO: 30611 - DNA, 21 bp, synthetic construct
  source 1..21: mol_type = other DNA; mol_type = other DNA
tattatcatgggatccaggcg

SEQ ID NO: 30612 - DNA, 21 bp, synthetic construct
  source 1..21: mol_type = other DNA; mol_type = other DNA
aaggacggctttagcacatac

SEQ ID NO: 30613 - DNA, 21 bp, synthetic construct
  source 1..21: mol_type = other DNA; mol_type = other DNA
aagtatgctttcagcactgaa

SEQ ID NO: 30614 - DNA, 21 bp, synthetic construct
  source 1..21: mol_type = other DNA; mol_type = other DNA
cactggtcgacaaacggcatc

SEQ ID NO: 30615 - DNA, 21 bp, synthetic construct
  source 1..21: mol_type = other DNA; mol_type = other DNA
aaggatggatacagcctatat

SEQ ID NO: 30616 - DNA, 21 bp, synthetic construct
  source 1..21: mol_type = other DNA; mol_type = other DNA
aggaacgagttcacagtgtac

SEQ ID NO: 30617 - DNA, 21 bp, synthetic construct
  source 1..21: mol_type = other DNA; mol_type = other DNA
ggtaatgggacgtcgcggtgg

SEQ ID NO: 30618 - DNA, 21 bp, synthetic construct
  source 1..21: mol_type = other DNA; mol_type = other DNA
tattcttcgcttaatataaat

SEQ ID NO: 30619 - DNA, 21 bp, synthetic construct
  source 1..21: mol_type = other DNA; mol_type = other DNA
caacataagctccagcctttg

SEQ ID NO: 30620 - DNA, 21 bp, synthetic construct
  source 1..21: mol_type = other DNA; mol_type = other DNA
cgtgatgactaccaatattac

SEQ ID NO: 30621 - DNA, 21 bp, synthetic construct
  source 1..21: mol_type = other DNA; mol_type = other DNA
tattttacgggtactaactca

SEQ ID NO: 30622 - DNA, 21 bp, synthetic construct
  source 1..21: mol_type = other DNA; mol_type = other DNA
tgcaagccaccaaaactggag

SEQ ID NO: 30623 - DNA, 21 bp, synthetic construct
  source 1..21: mol_type = other DNA; mol_type = other DNA
tacgctcgaaccggtttcaat

SEQ ID NO: 30624 - DNA, 21 bp, synthetic construct
  source 1..21: mol_type = other DNA; mol_type = other DNA
cgagaagatacctcatactgg

SEQ ID NO: 30625 - DNA, 21 bp, synthetic construct
  source 1..21: mol_type = other DNA; mol_type = other DNA
cgcaacgagttcacatccttc

SEQ ID NO: 30626 - DNA, 21 bp, synthetic construct
  source 1..21: mol_type = other DNA; mol_type = other DNA
tgtaaaagtacgaacggtata

SEQ ID NO: 30627 - DNA, 21 bp, synthetic construct
  source 1..21: mol_type = other DNA; mol_type = other DNA
ttttgcaagagtaacgcaaat

SEQ ID NO: 30628 - DNA, 21 bp, synthetic construct
  source 1..21: mol_type = other DNA; mol_type = other DNA
agctatgctttcagtcgcgaa

SEQ ID NO: 30629 - DNA, 21 bp, synthetic construct
  source 1..21: mol_type = other DNA; mol_type = other DNA
gattacgccgatcgcaagtgg

SEQ ID NO: 30630 - DNA, 21 bp, synthetic construct
  source 1..21: mol_type = other DNA; mol_type = other DNA
ggagacggtcgcagtcattgg

SEQ ID NO: 30631 - DNA, 21 bp, synthetic construct
  source 1..21: mol_type = other DNA; mol_type = other DNA
ttcttttccggacaaagagag

SEQ ID NO: 30632 - DNA, 21 bp, synthetic construct
  source 1..21: mol_type = other DNA; mol_type = other DNA
aaggatgactggaccccgtat

SEQ ID NO: 30633 - DNA, 21 bp, synthetic construct
  source 1..21: mol_type = other DNA; mol_type = other DNA
agtatgagtgatagatcttgg

SEQ ID NO: 30634 - DNA, 21 bp, synthetic construct
  source 1..21: mol_type = other DNA; mol_type = other DNA
tatgccaaaagcaatttcaat

SEQ ID NO: 30635 - DNA, 21 bp, synthetic construct
  source 1..21: mol_type = other DNA; mol_type = other DNA
taccatgctcgccaaataaac

SEQ ID NO: 30636 - DNA, 21 bp, synthetic construct
  source 1..21: mol_type = other DNA; mol_type = other DNA
tatagtagaaacggtattaat

SEQ ID NO: 30637 - DNA, 21 bp, synthetic construct
  source 1..21: mol_type = other DNA; mol_type = other DNA
ataggacgcactgggtgggac

SEQ ID NO: 30638 - DNA, 21 bp, synthetic construct
  source 1..21: mol_type = other DNA; mol_type = other DNA
gagttgagctcccgcgagtgg

SEQ ID NO: 30639 - DNA, 21 bp, synthetic construct
  source 1..21: mol_type = other DNA; mol_type = other DNA
ttgactcgtttacacgcagtc

SEQ ID NO: 30640 - DNA, 21 bp, synthetic construct
  source 1..21: mol_type = other DNA; mol_type = other DNA
tatagccgtgccgggtttaac

SEQ ID NO: 30641 - DNA, 21 bp, synthetic construct
  source 1..21: mol_type = other DNA; mol_type = other DNA
tattggagcgggacaaacgcg

SEQ ID NO: 30642 - DNA, 21 bp, synthetic construct
  source 1..21: mol_type = other DNA; mol_type = other DNA
aatgacgctacttcaaaatgg

SEQ ID NO: 30643 - DNA, 21 bp, synthetic construct
  source 1..21: mol_type = other DNA; mol_type = other DNA
tttttcacaggttatgtagac

SEQ ID NO: 30644 - DNA, 21 bp, synthetic construct
  source 1..21: mol_type = other DNA; mol_type = other DNA
agggaagacgtggtatactgg

SEQ ID NO: 30645 - DNA, 21 bp, synthetic construct
  source 1..21: mol_type = other DNA; mol_type = other DNA
cttcaccggcttcatttggat

SEQ ID NO: 30646 - DNA, 21 bp, synthetic construct
  source 1..21: mol_type = other DNA; mol_type = other DNA
taccataaatacaacgtaaat

SEQ ID NO: 30647 - DNA, 21 bp, synthetic construct
  source 1..21: mol_type = other DNA; mol_type = other DNA
tttgagggccgaggttggaat

SEQ ID NO: 30648 - DNA, 21 bp, synthetic construct
  source 1..21: mol_type = other DNA; mol_type = other DNA
tatagtagaatcaatcccaat

SEQ ID NO: 30649 - DNA, 21 bp, synthetic construct
  source 1..21: mol_type = other DNA; mol_type = other DNA
tacgccagagtaggctttaac

SEQ ID NO: 30650 - DNA, 21 bp, synthetic construct
  source 1..21: mol_type = other DNA; mol_type = other DNA
ctgagagagggggaatgtaaa

SEQ ID NO: 30651 - DNA, 21 bp, synthetic construct
  source 1..21: mol_type = other DNA; mol_type = other DNA
tgtaagccgcaagccgggggg

SEQ ID NO: 30652 - DNA, 21 bp, synthetic construct
  source 1..21: mol_type = other DNA; mol_type = other DNA
tgccgaagtcgtgtagacgag

SEQ ID NO: 30653 - DNA, 21 bp, synthetic construct
  source 1..21: mol_type = other DNA; mol_type = other DNA
tacttcaccggcgcttacgat

SEQ ID NO: 30654 - DNA, 21 bp, synthetic construct
  source 1..21: mol_type = other DNA; mol_type = other DNA
ggaggtgaaggaatccgttgg

SEQ ID NO: 30655 - DNA, 21 bp, synthetic construct
  source 1..21: mol_type = other DNA; mol_type = other DNA
tatagcaagagtaacactaac

SEQ ID NO: 30656 - DNA, 21 bp, synthetic construct
  source 1..21: mol_type = other DNA; mol_type = other DNA
gatttacagtctatcaaatgg

SEQ ID NO: 30657 - DNA, 21 bp, synthetic construct
  source 1..21: mol_type = other DNA; mol_type = other DNA
tactctagaatgaatcccaat

SEQ ID NO: 30658 - DNA, 21 bp, synthetic construct
  source 1..21: mol_type = other DNA; mol_type = other DNA
ttttttcacggcaagatagaa

SEQ ID NO: 30659 - DNA, 21 bp, synthetic construct
  source 1..21: mol_type = other DNA; mol_type = other DNA
ttaccgcgcgccggtgactgg

SEQ ID NO: 30660 - DNA, 21 bp, synthetic construct
  source 1..21: mol_type = other DNA; mol_type = other DNA
taccaccggcttagtgacttc

SEQ ID NO: 30661 - DNA, 21 bp, synthetic construct
  source 1..21: mol_type = other DNA; mol_type = other DNA
tgtaaaccacacagattagaa

SEQ ID NO: 30662 - DNA, 21 bp, synthetic construct
  source 1..21: mol_type = other DNA; mol_type = other DNA
agatcggaataccatacatat

SEQ ID NO: 30663 - DNA, 21 bp, synthetic construct
  source 1..21: mol_type = other DNA; mol_type = other DNA
tatgcgcgcatgggtatgaat

SEQ ID NO: 30664 - DNA, 21 bp, synthetic construct
  source 1..21: mol_type = other DNA; mol_type = other DNA
gacatgggctctgcgaattgg

SEQ ID NO: 30665 - DNA, 21 bp, synthetic construct
  source 1..21: mol_type = other DNA; mol_type = other DNA
tacttcagcgcagtccgagct

SEQ ID NO: 30666 - DNA, 21 bp, synthetic construct
  source 1..21: mol_type = other DNA; mol_type = other DNA
agggacagtacaaacggcatc

SEQ ID NO: 30667 - DNA, 21 bp, synthetic construct
  source 1..21: mol_type = other DNA; mol_type = other DNA
tgtaagcatcagcaagtagag

SEQ ID NO: 30668 - DNA, 21 bp, synthetic construct
  source 1..21: mol_type = other DNA; mol_type = other DNA
tactcgcgactcgggggtaat

SEQ ID NO: 30669 - DNA, 21 bp, synthetic construct
  source 1..21: mol_type = other DNA; mol_type = other DNA
tactataccggaatggtgaat

SEQ ID NO: 30670 - DNA, 21 bp, synthetic construct
  source 1..21: mol_type = other DNA; mol_type = other DNA
tacttctcaggtgtacgtagc

SEQ ID NO: 30671 - DNA, 21 bp, synthetic construct
  source 1..21: mol_type = other DNA; mol_type = other DNA
tactcaaggatcgggttcaac

SEQ ID NO: 30672 - DNA, 21 bp, synthetic construct
  source 1..21: mol_type = other DNA; mol_type = other DNA
tttagtaaaattggcttcaac

SEQ ID NO: 30673 - DNA, 21 bp, synthetic construct
  source 1..21: mol_type = other DNA; mol_type = other DNA
tactggacgggaatgacatcg

SEQ ID NO: 30674 - DNA, 21 bp, synthetic construct
  source 1..21: mol_type = other DNA; mol_type = other DNA
tatagtaggatgggtatgaat

SEQ ID NO: 30675 - DNA, 21 bp, synthetic construct
  source 1..21: mol_type = other DNA; mol_type = other DNA
tacttcacaggaattcatggg

SEQ ID NO: 30676 - DNA, 21 bp, synthetic construct
  source 1..21: mol_type = other DNA; mol_type = other DNA
tataaagccgatgccccatgc

SEQ ID NO: 30677 - DNA, 21 bp, synthetic construct
  source 1..21: mol_type = other DNA; mol_type = other DNA
attcagttcagtccgcttgat

SEQ ID NO: 30678 - DNA, 21 bp, synthetic construct
  source 1..21: mol_type = other DNA; mol_type = other DNA
ctaagccgtttaggtatcgat

SEQ ID NO: 30679 - DNA, 21 bp, synthetic construct
  source 1..21: mol_type = other DNA; mol_type = other DNA
ttacacagcactaatggtatc

SEQ ID NO: 30680 - DNA, 21 bp, synthetic construct
  source 1..21: mol_type = other DNA; mol_type = other DNA
tgtaaaccgaggactagtgag

SEQ ID NO: 30681 - DNA, 21 bp, synthetic construct
  source 1..21: mol_type = other DNA; mol_type = other DNA
accagtagtggagggtgtcag

SEQ ID NO: 30682 - DNA, 21 bp, synthetic construct
  source 1..21: mol_type = other DNA; mol_type = other DNA
aaggacgaatttaccgtatac

SEQ ID NO: 30683 - DNA, 21 bp, synthetic construct
  source 1..21: mol_type = other DNA; mol_type = other DNA
cgtgatgactttacgggctat

SEQ ID NO: 30684 - DNA, 21 bp, synthetic construct
  source 1..21: mol_type = other DNA; mol_type = other DNA
tacgcaaaggccggtttgaat

SEQ ID NO: 30685 - DNA, 21 bp, synthetic construct
  source 1..21: mol_type = other DNA; mol_type = other DNA
tgtaagcctcgccaacccgag

SEQ ID NO: 30686 - DNA, 21 bp, synthetic construct
  source 1..21: mol_type = other DNA; mol_type = other DNA
tactttacgggtacctctagt

SEQ ID NO: 30687 - DNA, 21 bp, synthetic construct
  source 1..21: mol_type = other DNA; mol_type = other DNA
tgtggcggaggtaaggcgcct

SEQ ID NO: 30688 - DNA, 21 bp, synthetic construct
  source 1..21: mol_type = other DNA; mol_type = other DNA
cgctcggaatttgctgtttac

SEQ ID NO: 30689 - DNA, 21 bp, synthetic construct
  source 1..21: mol_type = other DNA; mol_type = other DNA
tgcaagccccctagtggtatt

SEQ ID NO: 30690 - DNA, 21 bp, synthetic construct
  source 1..21: mol_type = other DNA; mol_type = other DNA
aggggggggggactttacgta

SEQ ID NO: 30691 - DNA, 21 bp, synthetic construct
  source 1..21: mol_type = other DNA; mol_type = other DNA
tgtaaagaagggaccagaatg

SEQ ID NO: 30692 - DNA, 21 bp, synthetic construct
  source 1..21: mol_type = other DNA; mol_type = other DNA
aaagacgattggactacatac

SEQ ID NO: 30693 - DNA, 21 bp, synthetic construct
  source 1..21: mol_type = other DNA; mol_type = other DNA
tacagcagaggaaatattaat

SEQ ID NO: 30694 - DNA, 21 bp, synthetic construct
  source 1..21: mol_type = other DNA; mol_type = other DNA
tgtcgtccagtaaaggacggt

SEQ ID NO: 30695 - DNA, 21 bp, synthetic construct
  source 1..21: mol_type = other DNA; mol_type = other DNA
tactggactgggatgacagat

SEQ ID NO: 30696 - DNA, 21 bp, synthetic construct
  source 1..21: mol_type = other DNA; mol_type = other DNA
gactatgcagacaggaaatgg

SEQ ID NO: 30697 - DNA, 21 bp, synthetic construct
  source 1..21: mol_type = other DNA; mol_type = other DNA
tggtggcacggggtcagcgcc

SEQ ID NO: 30698 - DNA, 21 bp, synthetic construct
  source 1..21: mol_type = other DNA; mol_type = other DNA
ctgtgtaaaccctgcctcctg

SEQ ID NO: 30699 - DNA, 21 bp, synthetic construct
  source 1..21: mol_type = other DNA; mol_type = other DNA
tacgacagtactaatggtcgc

SEQ ID NO: 30700 - DNA, 21 bp, synthetic construct
  source 1..21: mol_type = other DNA; mol_type = other DNA
ttgcgcgatgggactatggcc

SEQ ID NO: 30701 - DNA, 21 bp, synthetic construct
  source 1..21: mol_type = other DNA; mol_type = other DNA
tacttcactgggcaatgtgaa

SEQ ID NO: 30702 - DNA, 21 bp, synthetic construct
  source 1..21: mol_type = other DNA; mol_type = other DNA
tgtagaccgggcagcccagga

SEQ ID NO: 30703 - DNA, 21 bp, synthetic construct
  source 1..21: mol_type = other DNA; mol_type = other DNA
tgtaagcctgctcaagggagc

SEQ ID NO: 30704 - DNA, 21 bp, synthetic construct
  source 1..21: mol_type = other DNA; mol_type = other DNA
tgcaaaccagaaatgcgtcct

SEQ ID NO: 30705 - DNA, 21 bp, synthetic construct
  source 1..21: mol_type = other DNA; mol_type = other DNA
cgcgatggatcatctacatgg

SEQ ID NO: 30706 - DNA, 21 bp, synthetic construct
  source 1..21: mol_type = other DNA; mol_type = other DNA
ggatctgaaacaagtatgtgg

SEQ ID NO: 30707 - DNA, 21 bp, synthetic construct
  source 1..21: mol_type = other DNA; mol_type = other DNA
aaagacgattggaacacctgg

SEQ ID NO: 30708 - DNA, 21 bp, synthetic construct
  source 1..21: mol_type = other DNA; mol_type = other DNA
gttgggatgcgctgccctccc

SEQ ID NO: 30709 - DNA, 21 bp, synthetic construct
  source 1..21: mol_type = other DNA; mol_type = other DNA
tatgtaaagagtcaatgttca

SEQ ID NO: 30710 - DNA, 21 bp, synthetic construct
  source 1..21: mol_type = other DNA; mol_type = other DNA
agggggggggatcgaagctgg

SEQ ID NO: 30711 - DNA, 21 bp, synthetic construct
  source 1..21: mol_type = other DNA; mol_type = other DNA
agagacggcagcagcacgtgg

SEQ ID NO: 30712 - DNA, 21 bp, synthetic construct
  source 1..21: mol_type = other DNA; mol_type = other DNA
cggacttacaccgaattccca

SEQ ID NO: 30713 - DNA, 21 bp, synthetic construct
  source 1..21: mol_type = other DNA; mol_type = other DNA
tatttccagggtatacatgca

SEQ ID NO: 30714 - DNA, 21 bp, synthetic construct
  source 1..21: mol_type = other DNA; mol_type = other DNA
tattcacgactcaatgctaac

SEQ ID NO: 30715 - DNA, 21 bp, synthetic construct
  source 1..21: mol_type = other DNA; mol_type = other DNA
tttttctctacgaacggggta

SEQ ID NO: 30716 - DNA, 21 bp, synthetic construct
  source 1..21: mol_type = other DNA; mol_type = other DNA
atgtgccgtccttgcagcgag

SEQ ID NO: 30717 - DNA, 21 bp, synthetic construct
  source 1..21: mol_type = other DNA; mol_type = other DNA
taccacaggatgagtcccgac

SEQ ID NO: 30718 - DNA, 21 bp, synthetic construct
  source 1..21: mol_type = other DNA; mol_type = other DNA
tatgcacgaacatctcacaat

SEQ ID NO: 30719 - DNA, 21 bp, synthetic construct
  source 1..21: mol_type = other DNA; mol_type = other DNA
tcgactcccatgtgtaaggca

SEQ ID NO: 30720 - DNA, 21 bp, synthetic construct
  source 1..21: mol_type = other DNA; mol_type = other DNA
tactcgcgtatcatgccaaac

SEQ ID NO: 30721 - DNA, 21 bp, synthetic construct
  source 1..21: mol_type = other DNA; mol_type = other DNA
ttcttcagtggtgtccaggca

SEQ ID NO: 30722 - DNA, 21 bp, synthetic construct
  source 1..21: mol_type = other DNA; mol_type = other DNA
cgcaatgcaaccagcgcatgg

SEQ ID NO: 30723 - DNA, 21 bp, synthetic construct
  source 1..21: mol_type = other DNA; mol_type = other DNA
tattcgcggcaagggccaaat

SEQ ID NO: 30724 - DNA, 21 bp, synthetic construct
  source 1..21: mol_type = other DNA; mol_type = other DNA
tatgctcgtgacggtccaaac

SEQ ID NO: 30725 - DNA, 21 bp, synthetic construct
  source 1..21: mol_type = other DNA; mol_type = other DNA
aaggacgctctcaaatgcacg

SEQ ID NO: 30726 - DNA, 21 bp, synthetic construct
  source 1..21: mol_type = other DNA; mol_type = other DNA
tacttttcaggacggccggag

SEQ ID NO: 30727 - DNA, 21 bp, synthetic construct
  source 1..21: mol_type = other DNA; mol_type = other DNA
tatttcaccgggatgattcag

SEQ ID NO: 30728 - DNA, 21 bp, synthetic construct
  source 1..21: mol_type = other DNA; mol_type = other DNA
gggaagggtagttgtgagcag

SEQ ID NO: 30729 - DNA, 21 bp, synthetic construct
  source 1..21: mol_type = other DNA; mol_type = other DNA
tacagtagggcgggcggtaat

SEQ ID NO: 30730 - DNA, 21 bp, synthetic construct
  source 1..21: mol_type = other DNA; mol_type = other DNA
atgagccgcgcctcgtacaac

SEQ ID NO: 30731 - DNA, 21 bp, synthetic construct
  source 1..21: mol_type = other DNA; mol_type = other DNA
gttgaagctactaacggggtc

SEQ ID NO: 30732 - DNA, 21 bp, synthetic construct
  source 1..21: mol_type = other DNA; mol_type = other DNA
gtgaatgactatctgagctat

SEQ ID NO: 30733 - DNA, 21 bp, synthetic construct
  source 1..21: mol_type = other DNA; mol_type = other DNA
tattttagcggaacccggacg

SEQ ID NO: 30734 - DNA, 21 bp, synthetic construct
  source 1..21: mol_type = other DNA; mol_type = other DNA
tactggaccaaaattccggag

SEQ ID NO: 30735 - DNA, 21 bp, synthetic construct
  source 1..21: mol_type = other DNA; mol_type = other DNA
tgtgcccctgactatgtggag

SEQ ID NO: 30736 - DNA, 21 bp, synthetic construct
  source 1..21: mol_type = other DNA; mol_type = other DNA
gtgaagacagacagatgtgca

SEQ ID NO: 30737 - DNA, 21 bp, synthetic construct
  source 1..21: mol_type = other DNA; mol_type = other DNA
tgcaggcccaacacccaccct

SEQ ID NO: 30738 - DNA, 21 bp, synthetic construct
  source 1..21: mol_type = other DNA; mol_type = other DNA
tattcaagaattagcggtaac

SEQ ID NO: 30739 - DNA, 21 bp, synthetic construct
  source 1..21: mol_type = other DNA; mol_type = other DNA
tacgctcggtctaatttcaat

SEQ ID NO: 30740 - DNA, 21 bp, synthetic construct
  source 1..21: mol_type = other DNA; mol_type = other DNA
ttctttcacgggaaaattgac

SEQ ID NO: 30741 - DNA, 21 bp, synthetic construct
  source 1..21: mol_type = other DNA; mol_type = other DNA
tacttcgaaggtaggattgat

SEQ ID NO: 30742 - DNA, 21 bp, synthetic construct
  source 1..21: mol_type = other DNA; mol_type = other DNA
tactttagtggcatccatacg

SEQ ID NO: 30743 - DNA, 21 bp, synthetic construct
  source 1..21: mol_type = other DNA; mol_type = other DNA
tattggtcgaaaattgcggag

SEQ ID NO: 30744 - DNA, 21 bp, synthetic construct
  source 1..21: mol_type = other DNA; mol_type = other DNA
tgtaaggacgattccagggcg

SEQ ID NO: 30745 - DNA, 21 bp, synthetic construct
  source 1..21: mol_type = other DNA; mol_type = other DNA
aggacttatgatgcattcgcg

SEQ ID NO: 30746 - DNA, 21 bp, synthetic construct
  source 1..21: mol_type = other DNA; mol_type = other DNA
agggacgattatcagtactat

SEQ ID NO: 30747 - DNA, 21 bp, synthetic construct
  source 1..21: mol_type = other DNA; mol_type = other DNA
tacttaaagtcaaccaacaac

SEQ ID NO: 30748 - DNA, 21 bp, synthetic construct
  source 1..21: mol_type = other DNA; mol_type = other DNA
tatgctaggcagggcttcaat

SEQ ID NO: 30749 - DNA, 21 bp, synthetic construct
  source 1..21: mol_type = other DNA; mol_type = other DNA
tacttccaaggcgtaagagag

SEQ ID NO: 30750 - DNA, 21 bp, synthetic construct
  source 1..21: mol_type = other DNA; mol_type = other DNA
cgcactcccacttgcgcggga

SEQ ID NO: 30751 - DNA, 21 bp, synthetic construct
  source 1..21: mol_type = other DNA; mol_type = other DNA
ttgtcaagggtgagcgccgat

SEQ ID NO: 30752 - DNA, 21 bp, synthetic construct
  source 1..21: mol_type = other DNA; mol_type = other DNA
tgcgccccgtacctcgtggag

SEQ ID NO: 30753 - DNA, 21 bp, synthetic construct
  source 1..21: mol_type = other DNA; mol_type = other DNA
tatttcaccggcatgacggca

SEQ ID NO: 30754 - DNA, 21 bp, synthetic construct
  source 1..21: mol_type = other DNA; mol_type = other DNA
aagtacgcgttctcgacggaa

SEQ ID NO: 30755 - DNA, 21 bp, synthetic construct
  source 1..21: mol_type = other DNA; mol_type = other DNA
tacgcgcgcgggggtttcaat

SEQ ID NO: 30756 - DNA, 21 bp, synthetic construct
  source 1..21: mol_type = other DNA; mol_type = other DNA
tatactcgactcgactttgac

SEQ ID NO: 30757 - DNA, 21 bp, synthetic construct
  source 1..21: mol_type = other DNA; mol_type = other DNA
gacatgcagagcaatctctgg

SEQ ID NO: 30758 - DNA, 21 bp, synthetic construct
  source 1..21: mol_type = other DNA; mol_type = other DNA
ctcagcaaagtcggattcgac

SEQ ID NO: 30759 - DNA, 21 bp, synthetic construct
  source 1..21: mol_type = other DNA; mol_type = other DNA
atcaagtcgacgaacggagtt

SEQ ID NO: 30760 - DNA, 21 bp, synthetic construct
  source 1..21: mol_type = other DNA; mol_type = other DNA
tactggcaagggataccggcg

SEQ ID NO: 30761 - DNA, 21 bp, synthetic construct
  source 1..21: mol_type = other DNA; mol_type = other DNA
tactcgcgaactgggtacaat

SEQ ID NO: 30762 - DNA, 21 bp, synthetic construct
  source 1..21: mol_type = other DNA; mol_type = other DNA
tacagcaagcacggacacaac

SEQ ID NO: 30763 - DNA, 21 bp, synthetic construct
  source 1..21: mol_type = other DNA; mol_type = other DNA
tattttcatggaaaaattgta

SEQ ID NO: 30764 - DNA, 21 bp, synthetic construct
  source 1..21: mol_type = other DNA; mol_type = other DNA
tgggctcggggctgcgacaac

SEQ ID NO: 30765 - DNA, 21 bp, synthetic construct
  source 1..21: mol_type = other DNA; mol_type = other DNA
ctggctcgaagcggatgggat

SEQ ID NO: 30766 - DNA, 21 bp, synthetic construct
  source 1..21: mol_type = other DNA; mol_type = other DNA
tattggacgggtagacaggaa

SEQ ID NO: 30767 - DNA, 21 bp, synthetic construct
  source 1..21: mol_type = other DNA; mol_type = other DNA
tattggactggtaagccagag

SEQ ID NO: 30768 - DNA, 21 bp, synthetic construct
  source 1..21: mol_type = other DNA; mol_type = other DNA
atcggcagcactaacggcgtc

SEQ ID NO: 30769 - DNA, 21 bp, synthetic construct
  source 1..21: mol_type = other DNA; mol_type = other DNA
tactggaccgggaaagccgat

SEQ ID NO: 30770 - DNA, 21 bp, synthetic construct
  source 1..21: mol_type = other DNA; mol_type = other DNA
tattttcaaggtaggttggag

SEQ ID NO: 30771 - DNA, 21 bp, synthetic construct
  source 1..21: mol_type = other DNA; mol_type = other DNA
tacgcgaggcagggcattaac

SEQ ID NO: 30772 - DNA, 21 bp, synthetic construct
  source 1..21: mol_type = other DNA; mol_type = other DNA
tgctcgaaggaacacattcca

SEQ ID NO: 30773 - DNA, 21 bp, synthetic construct
  source 1..21: mol_type = other DNA; mol_type = other DNA
tacttttccaaacaaatcgca

SEQ ID NO: 30774 - DNA, 21 bp, synthetic construct
  source 1..21: mol_type = other DNA; mol_type = other DNA
ggtggagacgggaaccattac

SEQ ID NO: 30775 - DNA, 21 bp, synthetic construct
  source 1..21: mol_type = other DNA; mol_type = other DNA
gtgtcggagtttcagacgtat

SEQ ID NO: 30776 - DNA, 21 bp, synthetic construct
  source 1..21: mol_type = other DNA; mol_type = other DNA
ttagcgcgccttgggtgggac

SEQ ID NO: 30777 - DNA, 21 bp, synthetic construct
  source 1..21: mol_type = other DNA; mol_type = other DNA
tatcacaagcatgggccgcag

SEQ ID NO: 30778 - DNA, 21 bp, synthetic construct
  source 1..21: mol_type = other DNA; mol_type = other DNA
tggtcgcctatgtgtaaagca

SEQ ID NO: 30779 - DNA, 21 bp, synthetic construct
  source 1..21: mol_type = other DNA; mol_type = other DNA
tatgctcgtaccaacttgaat

SEQ ID NO: 30780 - DNA, 21 bp, synthetic construct
  source 1..21: mol_type = other DNA; mol_type = other DNA
agattacctgatgtgtacccc

SEQ ID NO: 30781 - DNA, 21 bp, synthetic construct
  source 1..21: mol_type = other DNA; mol_type = other DNA
tattacactggtatcccacac

SEQ ID NO: 30782 - DNA, 21 bp, synthetic construct
  source 1..21: mol_type = other DNA; mol_type = other DNA
cttgctaagagtggttgcaac

SEQ ID NO: 30783 - DNA, 21 bp, synthetic construct
  source 1..21: mol_type = other DNA; mol_type = other DNA
ttatcgcgggcaggcgaaaat

SEQ ID NO: 30784 - DNA, 21 bp, synthetic construct
  source 1..21: mol_type = other DNA; mol_type = other DNA
cgcacctacgatgccttcgca

SEQ ID NO: 30785 - DNA, 21 bp, synthetic construct
  source 1..21: mol_type = other DNA; mol_type = other DNA
tacttttccggacgcgcgcag

SEQ ID NO: 30786 - DNA, 21 bp, synthetic construct
  source 1..21: mol_type = other DNA; mol_type = other DNA
ggaggtgagttttcgcgctgg

SEQ ID NO: 30787 - DNA, 21 bp, synthetic construct
  source 1..21: mol_type = other DNA; mol_type = other DNA
tgtgtcagcgtggggagagct

SEQ ID NO: 30788 - DNA, 21 bp, synthetic construct
  source 1..21: mol_type = other DNA; mol_type = other DNA
caaaacacaaagtgggcatgt

SEQ ID NO: 30789 - DNA, 21 bp, synthetic construct
  source 1..21: mol_type = other DNA; mol_type = other DNA
aagttcgacaactgtggcagt

SEQ ID NO: 30790 - DNA, 21 bp, synthetic construct
  source 1..21: mol_type = other DNA; mol_type = other DNA
atggacgggacgagcctttgg

SEQ ID NO: 30791 - DNA, 21 bp, synthetic construct
  source 1..21: mol_type = other DNA; mol_type = other DNA
tattgggagggtgtcagagca

SEQ ID NO: 30792 - DNA, 21 bp, synthetic construct
  source 1..21: mol_type = other DNA; mol_type = other DNA
tattggacggggatgcaagat

SEQ ID NO: 30793 - DNA, 21 bp, synthetic construct
  source 1..21: mol_type = other DNA; mol_type = other DNA
tacgcacgtacaaatgcaaat

SEQ ID NO: 30794 - DNA, 21 bp, synthetic construct
  source 1..21: mol_type = other DNA; mol_type = other DNA
attaatagcacaaacgggata

SEQ ID NO: 30795 - DNA, 21 bp, synthetic construct
  source 1..21: mol_type = other DNA; mol_type = other DNA
gttggtagttgcgcacgagcc

SEQ ID NO: 30796 - DNA, 21 bp, synthetic construct
  source 1..21: mol_type = other DNA; mol_type = other DNA
aaggacgactggagctcatgg

SEQ ID NO: 30797 - DNA, 21 bp, synthetic construct
  source 1..21: mol_type = other DNA; mol_type = other DNA
tgtgaaagcgtctgcttgtat

SEQ ID NO: 30798 - DNA, 21 bp, synthetic construct
  source 1..21: mol_type = other DNA; mol_type = other DNA
tattctcggatagggtgtaac

SEQ ID NO: 30799 - DNA, 21 bp, synthetic construct
  source 1..21: mol_type = other DNA; mol_type = other DNA
tattacaccggaagattagat

SEQ ID NO: 30800 - DNA, 21 bp, synthetic construct
  source 1..21: mol_type = other DNA; mol_type = other DNA
tacttctctggccagaataat

SEQ ID NO: 30801 - DNA, 21 bp, synthetic construct
  source 1..21: mol_type = other DNA; mol_type = other DNA
tacgccaaggggggggcaaac

SEQ ID NO: 30802 - DNA, 21 bp, synthetic construct
  source 1..21: mol_type = other DNA; mol_type = other DNA
tactttgccggtcaaatagca

SEQ ID NO: 30803 - DNA, 21 bp, synthetic construct
  source 1..21: mol_type = other DNA; mol_type = other DNA
aggacttacgactcatacgcc

SEQ ID NO: 30804 - DNA, 21 bp, synthetic construct
  source 1..21: mol_type = other DNA; mol_type = other DNA
ttcttcactggcaccgtcgac

SEQ ID NO: 30805 - DNA, 21 bp, synthetic construct
  source 1..21: mol_type = other DNA; mol_type = other DNA
gacttagaatcgtataagtgg

SEQ ID NO: 30806 - DNA, 21 bp, synthetic construct
  source 1..21: mol_type = other DNA; mol_type = other DNA
aacatggaggatagaaaatgg

SEQ ID NO: 30807 - DNA, 21 bp, synthetic construct
  source 1..21: mol_type = other DNA; mol_type = other DNA
catctagcaagtcacgactgg

SEQ ID NO: 30808 - DNA, 21 bp, synthetic construct
  source 1..21: mol_type = other DNA; mol_type = other DNA
tatagcagacagaacgacaat

SEQ ID NO: 30809 - DNA, 21 bp, synthetic construct
  source 1..21: mol_type = other DNA; mol_type = other DNA
ggaggaagcacttcaacctgg

SEQ ID NO: 30810 - DNA, 21 bp, synthetic construct
  source 1..21: mol_type = other DNA; mol_type = other DNA
tttttcactggaagactggac

SEQ ID NO: 30811 - DNA, 21 bp, synthetic construct
  source 1..21: mol_type = other DNA; mol_type = other DNA
agaatggaggtgggggattgg

SEQ ID NO: 30812 - DNA, 21 bp, synthetic construct
  source 1..21: mol_type = other DNA; mol_type = other DNA
cgcacctacacagagttccct

SEQ ID NO: 30813 - DNA, 21 bp, synthetic construct
  source 1..21: mol_type = other DNA; mol_type = other DNA
tactcacggactggtcagaat

SEQ ID NO: 30814 - DNA, 21 bp, synthetic construct
  source 1..21: mol_type = other DNA; mol_type = other DNA
tgtaagccgcgctcaatagag

SEQ ID NO: 30815 - DNA, 21 bp, synthetic construct
  source 1..21: mol_type = other DNA; mol_type = other DNA
tactcaaggatcaacgtaaat

SEQ ID NO: 30816 - DNA, 21 bp, synthetic construct
  source 1..21: mol_type = other DNA; mol_type = other DNA
ataatgcaggaccgttcctgg

SEQ ID NO: 30817 - DNA, 21 bp, synthetic construct
  source 1..21: mol_type = other DNA; mol_type = other DNA
aggctggattcgcgcgagtgg

SEQ ID NO: 30818 - DNA, 21 bp, synthetic construct
  source 1..21: mol_type = other DNA; mol_type = other DNA
tgtactagtaagacgggaaat

SEQ ID NO: 30819 - DNA, 21 bp, synthetic construct
  source 1..21: mol_type = other DNA; mol_type = other DNA
tatgcgcgtcaaggaacgaat

SEQ ID NO: 30820 - DNA, 21 bp, synthetic construct
  source 1..21: mol_type = other DNA; mol_type = other DNA
tatattaaaagtgactaccaa

SEQ ID NO: 30821 - DNA, 21 bp, synthetic construct
  source 1..21: mol_type = other DNA; mol_type = other DNA
atgctcactggcaagtgcgaa

SEQ ID NO: 30822 - DNA, 21 bp, synthetic construct
  source 1..21: mol_type = other DNA; mol_type = other DNA
ctcgccaaaaacggagtaaac

SEQ ID NO: 30823 - DNA, 21 bp, synthetic construct
  source 1..21: mol_type = other DNA; mol_type = other DNA
tactggcatggcgttactgaa

SEQ ID NO: 30824 - DNA, 21 bp, synthetic construct
  source 1..21: mol_type = other DNA; mol_type = other DNA
gtgatgagcagcaatggcgta

SEQ ID NO: 30825 - DNA, 21 bp, synthetic construct
  source 1..21: mol_type = other DNA; mol_type = other DNA
tacgcgaagaacggaataaac

SEQ ID NO: 30826 - DNA, 21 bp, synthetic construct
  source 1..21: mol_type = other DNA; mol_type = other DNA
ctgatttcaggagatggccca

SEQ ID NO: 30827 - DNA, 21 bp, synthetic construct
  source 1..21: mol_type = other DNA; mol_type = other DNA
ttcagcagggcgggtcacaac

SEQ ID NO: 30828 - DNA, 21 bp, synthetic construct
  source 1..21: mol_type = other DNA; mol_type = other DNA
tgcgaacgtaaaactgatgcc

SEQ ID NO: 30829 - DNA, 21 bp, synthetic construct
  source 1..21: mol_type = other DNA; mol_type = other DNA
tactctcggaatggtccgaac

SEQ ID NO: 30830 - DNA, 21 bp, synthetic construct
  source 1..21: mol_type = other DNA; mol_type = other DNA
aacggaaatgcgtgtagacca

SEQ ID NO: 30831 - DNA, 21 bp, synthetic construct
  source 1..21: mol_type = other DNA; mol_type = other DNA
tgtgttgcgactaaagaccgc

SEQ ID NO: 30832 - DNA, 21 bp, synthetic construct
  source 1..21: mol_type = other DNA; mol_type = other DNA
tgcgctccgacttacagggag

SEQ ID NO: 30833 - DNA, 21 bp, synthetic construct
  source 1..21: mol_type = other DNA; mol_type = other DNA
tgtaaaagcgaacatgtgcgc

SEQ ID NO: 30834 - DNA, 21 bp, synthetic construct
  source 1..21: mol_type = other DNA; mol_type = other DNA
cggccggtgtgtccaacggga

SEQ ID NO: 30835 - DNA, 21 bp, synthetic construct
  source 1..21: mol_type = other DNA; mol_type = other DNA
aaggacgggtataccgtgtat

SEQ ID NO: 30836 - DNA, 21 bp, synthetic construct
  source 1..21: mol_type = other DNA; mol_type = other DNA
aactgcaaaccgtgctttgat

SEQ ID NO: 30837 - DNA, 21 bp, synthetic construct
  source 1..21: mol_type = other DNA; mol_type = other DNA
tactcccgactaaacgtaaac

SEQ ID NO: 30838 - DNA, 21 bp, synthetic construct
  source 1..21: mol_type = other DNA; mol_type = other DNA
gtgacagacacaaacggcgtg

SEQ ID NO: 30839 - DNA, 21 bp, synthetic construct
  source 1..21: mol_type = other DNA; mol_type = other DNA
tgtagagacgtaaaacagggc

SEQ ID NO: 30840 - DNA, 21 bp, synthetic construct
  source 1..21: mol_type = other DNA; mol_type = other DNA
tatgttaggtccgggccagac

SEQ ID NO: 30841 - DNA, 21 bp, synthetic construct
  source 1..21: mol_type = other DNA; mol_type = other DNA
tttagccgcttagggcagaac

SEQ ID NO: 30842 - DNA, 21 bp, synthetic construct
  source 1..21: mol_type = other DNA; mol_type = other DNA
ttctttacaggctttatagac

SEQ ID NO: 30843 - DNA, 21 bp, synthetic construct
  source 1..21: mol_type = other DNA; mol_type = other DNA
cgcgaggatatggtttcgtgg

SEQ ID NO: 30844 - DNA, 21 bp, synthetic construct
  source 1..21: mol_type = other DNA; mol_type = other DNA
tatgcgagactagggtcaaat

SEQ ID NO: 30845 - DNA, 21 bp, synthetic construct
  source 1..21: mol_type = other DNA; mol_type = other DNA
tgtggtcgggctggcagagat

SEQ ID NO: 30846 - DNA, 21 bp, synthetic construct
  source 1..21: mol_type = other DNA; mol_type = other DNA
ggctcgaacacgagtcgttgg

SEQ ID NO: 30847 - DNA, 21 bp, synthetic construct
  source 1..21: mol_type = other DNA; mol_type = other DNA
ctccatcgcgacggcattaac

SEQ ID NO: 30848 - DNA, 21 bp, synthetic construct
  source 1..21: mol_type = other DNA; mol_type = other DNA
tacagtcgagtgaatataaac

SEQ ID NO: 30849 - DNA, 21 bp, synthetic construct
  source 1..21: mol_type = other DNA; mol_type = other DNA
ctcatgaatgacgcttacgtt

SEQ ID NO: 30850 - DNA, 21 bp, synthetic construct
  source 1..21: mol_type = other DNA; mol_type = other DNA
cgtaccttagaaacgttcccg

SEQ ID NO: 30851 - DNA, 21 bp, synthetic construct
  source 1..21: mol_type = other DNA; mol_type = other DNA
ttcttcagtggagtccgtgac

SEQ ID NO: 30852 - DNA, 21 bp, synthetic construct
  source 1..21: mol_type = other DNA; mol_type = other DNA
tacttctctggcaaagctttg

SEQ ID NO: 30853 - DNA, 21 bp, synthetic construct
  source 1..21: mol_type = other DNA; mol_type = other DNA
tattattctggacaaaaagag

SEQ ID NO: 30854 - DNA, 21 bp, synthetic construct
  source 1..21: mol_type = other DNA; mol_type = other DNA
tacagtaggcaaaacgagaac

SEQ ID NO: 30855 - DNA, 21 bp, synthetic construct
  source 1..21: mol_type = other DNA; mol_type = other DNA
tactggagtggcaccaacgcg

SEQ ID NO: 30856 - DNA, 21 bp, synthetic construct
  source 1..21: mol_type = other DNA; mol_type = other DNA
tattctcgcattggtccatcg

SEQ ID NO: 30857 - DNA, 21 bp, synthetic construct
  source 1..21: mol_type = other DNA; mol_type = other DNA
gcgggtgcctgtgatgccagc

SEQ ID NO: 30858 - DNA, 21 bp, synthetic construct
  source 1..21: mol_type = other DNA; mol_type = other DNA
aaagacgattatacctctttc

SEQ ID NO: 30859 - DNA, 21 bp, synthetic construct
  source 1..21: mol_type = other DNA; mol_type = other DNA
ttttgtcgaccctgtcctgta

SEQ ID NO: 30860 - DNA, 21 bp, synthetic construct
  source 1..21: mol_type = other DNA; mol_type = other DNA
tactatacgggtgtgcgtgat

SEQ ID NO: 30861 - DNA, 21 bp, synthetic construct
  source 1..21: mol_type = other DNA; mol_type = other DNA
tgtaagcgccagagtcctgag

SEQ ID NO: 30862 - DNA, 21 bp, synthetic construct
  source 1..21: mol_type = other DNA; mol_type = other DNA
tatcacaagggaaataataat

SEQ ID NO: 30863 - DNA, 21 bp, synthetic construct
  source 1..21: mol_type = other DNA; mol_type = other DNA
tacagccgtatgggacagaac

SEQ ID NO: 30864 - DNA, 21 bp, synthetic construct
  source 1..21: mol_type = other DNA; mol_type = other DNA
ccctatgctcgatccccctct

SEQ ID NO: 30865 - DNA, 21 bp, synthetic construct
  source 1..21: mol_type = other DNA; mol_type = other DNA
tactggagtaaagttccggac

SEQ ID NO: 30866 - DNA, 21 bp, synthetic construct
  source 1..21: mol_type = other DNA; mol_type = other DNA
tgcgccccgtacttacatgca

SEQ ID NO: 30867 - DNA, 21 bp, synthetic construct
  source 1..21: mol_type = other DNA; mol_type = other DNA
ctgtgccgcccctgttttgag

SEQ ID NO: 30868 - DNA, 21 bp, synthetic construct
  source 1..21: mol_type = other DNA; mol_type = other DNA
ggtgatgagtggaaaacttgg

SEQ ID NO: 30869 - DNA, 21 bp, synthetic construct
  source 1..21: mol_type = other DNA; mol_type = other DNA
tgtaagaaacttggaccagac

SEQ ID NO: 30870 - DNA, 21 bp, synthetic construct
  source 1..21: mol_type = other DNA; mol_type = other DNA
tacgtccgtaacgacccgaat

SEQ ID NO: 30871 - DNA, 21 bp, synthetic construct
  source 1..21: mol_type = other DNA; mol_type = other DNA
tactggcaaggaaaaatcgcg

SEQ ID NO: 30872 - DNA, 21 bp, synthetic construct
  source 1..21: mol_type = other DNA; mol_type = other DNA
atgttcgatggaacacgcgcg

SEQ ID NO: 30873 - DNA, 21 bp, synthetic construct
  source 1..21: mol_type = other DNA; mol_type = other DNA
tggttctctgggaagattgac

SEQ ID NO: 30874 - DNA, 21 bp, synthetic construct
  source 1..21: mol_type = other DNA; mol_type = other DNA
ttatgtaagcccccattaact

SEQ ID NO: 30875 - DNA, 21 bp, synthetic construct
  source 1..21: mol_type = other DNA; mol_type = other DNA
accccagactcggtcaggtgg

SEQ ID NO: 30876 - DNA, 21 bp, synthetic construct
  source 1..21: mol_type = other DNA; mol_type = other DNA
ttcttctcaggaattacggaa

SEQ ID NO: 30877 - DNA, 21 bp, synthetic construct
  source 1..21: mol_type = other DNA; mol_type = other DNA
tggactcccatgtgccaggct

SEQ ID NO: 30878 - DNA, 21 bp, synthetic construct
  source 1..21: mol_type = other DNA; mol_type = other DNA
tgcagaccagatgtcgttggg

SEQ ID NO: 30879 - DNA, 21 bp, synthetic construct
  source 1..21: mol_type = other DNA; mol_type = other DNA
catgaaagtactaacggaatt

SEQ ID NO: 30880 - DNA, 21 bp, synthetic construct
  source 1..21: mol_type = other DNA; mol_type = other DNA
tgcaaaccctttactcgtgag

SEQ ID NO: 30881 - DNA, 21 bp, synthetic construct
  source 1..21: mol_type = other DNA; mol_type = other DNA
tactttacaggaagcgttgat

SEQ ID NO: 30882 - DNA, 21 bp, synthetic construct
  source 1..21: mol_type = other DNA; mol_type = other DNA
acttcggagtgtgtcaaatac

SEQ ID NO: 30883 - DNA, 21 bp, synthetic construct
  source 1..21: mol_type = other DNA; mol_type = other DNA
gctccggagtcggtcagatgg

SEQ ID NO: 30884 - DNA, 21 bp, synthetic construct
  source 1..21: mol_type = other DNA; mol_type = other DNA
ggcagcgaaacgagtaagtgg

SEQ ID NO: 30885 - DNA, 21 bp, synthetic construct
  source 1..21: mol_type = other DNA; mol_type = other DNA
tattggacgggcaagcaagac

SEQ ID NO: 30886 - DNA, 21 bp, synthetic construct
  source 1..21: mol_type = other DNA; mol_type = other DNA
aggacatacgatgtatatcct

SEQ ID NO: 30887 - DNA, 21 bp, synthetic construct
  source 1..21: mol_type = other DNA; mol_type = other DNA
tacagccgggtaaatatgaat

SEQ ID NO: 30888 - DNA, 21 bp, synthetic construct
  source 1..21: mol_type = other DNA; mol_type = other DNA
tgggttagatccgacgttaag

SEQ ID NO: 30889 - DNA, 21 bp, synthetic construct
  source 1..21: mol_type = other DNA; mol_type = other DNA
aggtcagagttcacgtcgtac

SEQ ID NO: 30890 - DNA, 21 bp, synthetic construct
  source 1..21: mol_type = other DNA; mol_type = other DNA
tgtgagtcagtttgcctctac

SEQ ID NO: 30891 - DNA, 21 bp, synthetic construct
  source 1..21: mol_type = other DNA; mol_type = other DNA
cgtgacggaagcagcgggtgg

SEQ ID NO: 30892 - DNA, 21 bp, synthetic construct
  source 1..21: mol_type = other DNA; mol_type = other DNA
tactggtcgggccagagggaa

SEQ ID NO: 30893 - DNA, 21 bp, synthetic construct
  source 1..21: mol_type = other DNA; mol_type = other DNA
tactcgaaacataacatgaat

SEQ ID NO: 30894 - DNA, 21 bp, synthetic construct
  source 1..21: mol_type = other DNA; mol_type = other DNA
attcctagttccgttaggtgg

SEQ ID NO: 30895 - DNA, 21 bp, synthetic construct
  source 1..21: mol_type = other DNA; mol_type = other DNA
tactttagcggtgttagccat

SEQ ID NO: 30896 - DNA, 21 bp, synthetic construct
  source 1..21: mol_type = other DNA; mol_type = other DNA
gcgcctgataccgtccgatgg

SEQ ID NO: 30897 - DNA, 21 bp, synthetic construct
  source 1..21: mol_type = other DNA; mol_type = other DNA
tggtggagcggacagaaagac

SEQ ID NO: 30898 - DNA, 21 bp, synthetic construct
  source 1..21: mol_type = other DNA; mol_type = other DNA
tatgcgcgcaatggaatgaac

SEQ ID NO: 30899 - DNA, 21 bp, synthetic construct
  source 1..21: mol_type = other DNA; mol_type = other DNA
agaaacggcactagtgcgtgg

SEQ ID NO: 30900 - DNA, 21 bp, synthetic construct
  source 1..21: mol_type = other DNA; mol_type = other DNA
gtgggctacgaccggggctgg

SEQ ID NO: 30901 - DNA, 21 bp, synthetic construct
  source 1..21: mol_type = other DNA; mol_type = other DNA
tacgcaaagcaaaattataac

SEQ ID NO: 30902 - DNA, 21 bp, synthetic construct
  source 1..21: mol_type = other DNA; mol_type = other DNA
ttcccgggcagcatttgcgtc

SEQ ID NO: 30903 - DNA, 21 bp, synthetic construct
  source 1..21: mol_type = other DNA; mol_type = other DNA
tacgtcagaagcgatgatagt

SEQ ID NO: 30904 - DNA, 21 bp, synthetic construct
  source 1..21: mol_type = other DNA; mol_type = other DNA
agcggcgccaccagtaactgg

SEQ ID NO: 30905 - DNA, 21 bp, synthetic construct
  source 1..21: mol_type = other DNA; mol_type = other DNA
tgtaaaccaggcagcccgcac

SEQ ID NO: 30906 - DNA, 21 bp, synthetic construct
  source 1..21: mol_type = other DNA; mol_type = other DNA
gaagccttgaatggctgggat

SEQ ID NO: 30907 - DNA, 21 bp, synthetic construct
  source 1..21: mol_type = other DNA; mol_type = other DNA
tatagtaaatggaacgcgaat

SEQ ID NO: 30908 - DNA, 21 bp, synthetic construct
  source 1..21: mol_type = other DNA; mol_type = other DNA
tacagtaggcagaacgccaat

SEQ ID NO: 30909 - DNA, 21 bp, synthetic construct
  source 1..21: mol_type = other DNA; mol_type = other DNA
gagaatggtggtggaagatgg

SEQ ID NO: 30910 - DNA, 21 bp, synthetic construct
  source 1..21: mol_type = other DNA; mol_type = other DNA
tattggtcaggaaccacgtct

SEQ ID NO: 30911 - DNA, 21 bp, synthetic construct
  source 1..21: mol_type = other DNA; mol_type = other DNA
gggtccaccgtctgtaaggac

SEQ ID NO: 30912 - DNA, 21 bp, synthetic construct
  source 1..21: mol_type = other DNA; mol_type = other DNA
tactttactggtatgaccgcg

SEQ ID NO: 30913 - DNA, 21 bp, synthetic construct
  source 1..21: mol_type = other DNA; mol_type = other DNA
ttacaccgattgcatcctctt

SEQ ID NO: 30914 - DNA, 21 bp, synthetic construct
  source 1..21: mol_type = other DNA; mol_type = other DNA
tgcgctccaagctaccgggaa

SEQ ID NO: 30915 - DNA, 21 bp, synthetic construct
  source 1..21: mol_type = other DNA; mol_type = other DNA
agagagtatgactcatttccc

SEQ ID NO: 30916 - DNA, 21 bp, synthetic construct
  source 1..21: mol_type = other DNA; mol_type = other DNA
aaggacgatttcatgacgtac

SEQ ID NO: 30917 - DNA, 21 bp, synthetic construct
  source 1..21: mol_type = other DNA; mol_type = other DNA
tatgcacgtttgaatataaac

SEQ ID NO: 30918 - DNA, 21 bp, synthetic construct
  source 1..21: mol_type = other DNA; mol_type = other DNA
tatttttctggtgtgatgcag

SEQ ID NO: 30919 - DNA, 21 bp, synthetic construct
  source 1..21: mol_type = other DNA; mol_type = other DNA
atgacaggcgggtcatgtctc

SEQ ID NO: 30920 - DNA, 21 bp, synthetic construct
  source 1..21: mol_type = other DNA; mol_type = other DNA
cgaaatgaattccaaagctac

SEQ ID NO: 30921 - DNA, 21 bp, synthetic construct
  source 1..21: mol_type = other DNA; mol_type = other DNA
ttcgactcgaccaatggtaga

SEQ ID NO: 30922 - DNA, 21 bp, synthetic construct
  source 1..21: mol_type = other DNA; mol_type = other DNA
tttttctcagggagagttgaa

SEQ ID NO: 30923 - DNA, 21 bp, synthetic construct
  source 1..21: mol_type = other DNA; mol_type = other DNA
agggagcagacggttcactgg

SEQ ID NO: 30924 - DNA, 21 bp, synthetic construct
  source 1..21: mol_type = other DNA; mol_type = other DNA
tacagccgaatcggaccgagt

SEQ ID NO: 30925 - DNA, 21 bp, synthetic construct
  source 1..21: mol_type = other DNA; mol_type = other DNA
tggctcaaacgacaggattgt

SEQ ID NO: 30926 - DNA, 21 bp, synthetic construct
  source 1..21: mol_type = other DNA; mol_type = other DNA
gatttaagggacgtcaaatgg

SEQ ID NO: 30927 - DNA, 21 bp, synthetic construct
  source 1..21: mol_type = other DNA; mol_type = other DNA
ggctgtcgcatgggagatata

SEQ ID NO: 30928 - DNA, 21 bp, synthetic construct
  source 1..21: mol_type = other DNA; mol_type = other DNA
tggtgggcaggcgtaaaaggt

SEQ ID NO: 30929 - DNA, 21 bp, synthetic construct
  source 1..21: mol_type = other DNA; mol_type = other DNA
tattataccgggatgcgggac

SEQ ID NO: 30930 - DNA, 21 bp, synthetic construct
  source 1..21: mol_type = other DNA; mol_type = other DNA
tactcgaagtataacttcaac

SEQ ID NO: 30931 - DNA, 21 bp, synthetic construct
  source 1..21: mol_type = other DNA; mol_type = other DNA
tattggtcgcaagtaaaagaa

SEQ ID NO: 30932 - DNA, 21 bp, synthetic construct
  source 1..21: mol_type = other DNA; mol_type = other DNA
ttttttagtggagttcaagct

SEQ ID NO: 30933 - DNA, 21 bp, synthetic construct
  source 1..21: mol_type = other DNA; mol_type = other DNA
tactttgcaggtcaggtcgcc

SEQ ID NO: 30934 - DNA, 21 bp, synthetic construct
  source 1..21: mol_type = other DNA; mol_type = other DNA
ggtttacccactcgttgtcct

SEQ ID NO: 30935 - DNA, 21 bp, synthetic construct
  source 1..21: mol_type = other DNA; mol_type = other DNA
tttgaagcccctaatagctgg

SEQ ID NO: 30936 - DNA, 21 bp, synthetic construct
  source 1..21: mol_type = other DNA; mol_type = other DNA
ctgtcgcgcacaggtgataac

SEQ ID NO: 30937 - DNA, 21 bp, synthetic construct
  source 1..21: mol_type = other DNA; mol_type = other DNA
gctacggaaacagggcctaaa

SEQ ID NO: 30938 - DNA, 21 bp, synthetic construct
  source 1..21: mol_type = other DNA; mol_type = other DNA
tattcatctacgaatggcgtg

SEQ ID NO: 30939 - DNA, 21 bp, synthetic construct
  source 1..21: mol_type = other DNA; mol_type = other DNA
tacttctcgggaatccctatg

SEQ ID NO: 30940 - DNA, 21 bp, synthetic construct
  source 1..21: mol_type = other DNA; mol_type = other DNA
gcgccgggcgacataagatgg

SEQ ID NO: 30941 - DNA, 21 bp, synthetic construct
  source 1..21: mol_type = other DNA; mol_type = other DNA
tatttctcggcagttcgtgaa

SEQ ID NO: 30942 - DNA, 21 bp, synthetic construct
  source 1..21: mol_type = other DNA; mol_type = other DNA
cgtagtgctgacgcctttccg

SEQ ID NO: 30943 - DNA, 21 bp, synthetic construct
  source 1..21: mol_type = other DNA; mol_type = other DNA
ggacttgccgaccgctcatgg

SEQ ID NO: 30944 - DNA, 21 bp, synthetic construct
  source 1..21: mol_type = other DNA; mol_type = other DNA
caagacgaatatttgagttgg

SEQ ID NO: 30945 - DNA, 21 bp, synthetic construct
  source 1..21: mol_type = other DNA; mol_type = other DNA
tacgcgaagaacggggtcaac

SEQ ID NO: 30946 - DNA, 21 bp, synthetic construct
  source 1..21: mol_type = other DNA; mol_type = other DNA
ccgtacgcccgcagcgtggac

SEQ ID NO: 30947 - DNA, 21 bp, synthetic construct
  source 1..21: mol_type = other DNA; mol_type = other DNA
atgttaagcgatcgtctgtgg

SEQ ID NO: 30948 - DNA, 21 bp, synthetic construct
  source 1..21: mol_type = other DNA; mol_type = other DNA
aaagacgactatacacgtttc

SEQ ID NO: 30949 - DNA, 21 bp, synthetic construct
  source 1..21: mol_type = other DNA; mol_type = other DNA
agagactcaacacacggtgtg

SEQ ID NO: 30950 - DNA, 21 bp, synthetic construct
  source 1..21: mol_type = other DNA; mol_type = other DNA
tatttcactggtcaacacaat

SEQ ID NO: 30951 - DNA, 21 bp, synthetic construct
  source 1..21: mol_type = other DNA; mol_type = other DNA
tactcacggatcgggccaatg

SEQ ID NO: 30952 - DNA, 21 bp, synthetic construct
  source 1..21: mol_type = other DNA; mol_type = other DNA
cgcgacgaggggacctattgg

SEQ ID NO: 30953 - DNA, 21 bp, synthetic construct
  source 1..21: mol_type = other DNA; mol_type = other DNA
tatagtcgcatgggtaacaat

SEQ ID NO: 30954 - DNA, 21 bp, synthetic construct
  source 1..21: mol_type = other DNA; mol_type = other DNA
gctttttgtaccaacaagact

SEQ ID NO: 30955 - DNA, 21 bp, synthetic construct
  source 1..21: mol_type = other DNA; mol_type = other DNA
tattcgcgattaaataacaat

SEQ ID NO: 30956 - DNA, 21 bp, synthetic construct
  source 1..21: mol_type = other DNA; mol_type = other DNA
tgcgctaaggactacagagag

SEQ ID NO: 30957 - DNA, 21 bp, synthetic construct
  source 1..21: mol_type = other DNA; mol_type = other DNA
ggcgttcctggtgtaatgtgg

SEQ ID NO: 30958 - DNA, 21 bp, synthetic construct
  source 1..21: mol_type = other DNA; mol_type = other DNA
tattggtcagggaaaaccgaa

SEQ ID NO: 30959 - DNA, 21 bp, synthetic construct
  source 1..21: mol_type = other DNA; mol_type = other DNA
tgcaaactaccgaagagtgag

SEQ ID NO: 30960 - DNA, 21 bp, synthetic construct
  source 1..21: mol_type = other DNA; mol_type = other DNA
tgtggtaaaggggggcctgta

SEQ ID NO: 30961 - DNA, 21 bp, synthetic construct
  source 1..21: mol_type = other DNA; mol_type = other DNA
caaatgcaagaccgttcatgg

SEQ ID NO: 30962 - DNA, 21 bp, synthetic construct
  source 1..21: mol_type = other DNA; mol_type = other DNA
atgtgggatggaacggaagcc

SEQ ID NO: 30963 - DNA, 21 bp, synthetic construct
  source 1..21: mol_type = other DNA; mol_type = other DNA
gtgcctgagcgctgtcctaaa

SEQ ID NO: 30964 - DNA, 21 bp, synthetic construct
  source 1..21: mol_type = other DNA; mol_type = other DNA
tattggaccggaaaacatgag

SEQ ID NO: 30965 - DNA, 21 bp, synthetic construct
  source 1..21: mol_type = other DNA; mol_type = other DNA
tattcaaagatgggaaagaac

SEQ ID NO: 30966 - DNA, 21 bp, synthetic construct
  source 1..21: mol_type = other DNA; mol_type = other DNA
tactatacggggaggctcgag

SEQ ID NO: 30967 - DNA, 21 bp, synthetic construct
  source 1..21: mol_type = other DNA; mol_type = other DNA
attgacagtacgaatggaatc

SEQ ID NO: 30968 - DNA, 21 bp, synthetic construct
  source 1..21: mol_type = other DNA; mol_type = other DNA
tatttcgaggggcgtaaagag

SEQ ID NO: 30969 - DNA, 21 bp, synthetic construct
  source 1..21: mol_type = other DNA; mol_type = other DNA
tgcaaatcggatagtaaggta

SEQ ID NO: 30970 - DNA, 21 bp, synthetic construct
  source 1..21: mol_type = other DNA; mol_type = other DNA
cgagagatgtcggtatatcct

SEQ ID NO: 30971 - DNA, 21 bp, synthetic construct
  source 1..21: mol_type = other DNA; mol_type = other DNA
tactctcggagcaacctgaat

SEQ ID NO: 30972 - DNA, 21 bp, synthetic construct
  source 1..21: mol_type = other DNA; mol_type = other DNA
taccataaaaataatgcaaac

SEQ ID NO: 30973 - DNA, 21 bp, synthetic construct
  source 1..21: mol_type = other DNA; mol_type = other DNA
aagttggatgttggaaattgg

SEQ ID NO: 30974 - DNA, 21 bp, synthetic construct
  source 1..21: mol_type = other DNA; mol_type = other DNA
tattcacgaaccggcactaac

SEQ ID NO: 30975 - DNA, 21 bp, synthetic construct
  source 1..21: mol_type = other DNA; mol_type = other DNA
ggggggccggggagtgtatgg

SEQ ID NO: 30976 - DNA, 21 bp, synthetic construct
  source 1..21: mol_type = other DNA; mol_type = other DNA
ttatcgagagccagcatcgat

SEQ ID NO: 30977 - DNA, 21 bp, synthetic construct
  source 1..21: mol_type = other DNA; mol_type = other DNA
tatagccggtcgggtgacaat

SEQ ID NO: 30978 - DNA, 21 bp, synthetic construct
  source 1..21: mol_type = other DNA; mol_type = other DNA
tactggtcggggaaacatgag

SEQ ID NO: 30979 - DNA, 21 bp, synthetic construct
  source 1..21: mol_type = other DNA; mol_type = other DNA
tacttccatggacaattagaa

SEQ ID NO: 30980 - DNA, 21 bp, synthetic construct
  source 1..21: mol_type = other DNA; mol_type = other DNA
tacgtccgaagcggccccgac

SEQ ID NO: 30981 - DNA, 21 bp, synthetic construct
  source 1..21: mol_type = other DNA; mol_type = other DNA
tattatagtggagtcatcatg

SEQ ID NO: 30982 - DNA, 21 bp, synthetic construct
  source 1..21: mol_type = other DNA; mol_type = other DNA
tttttcactggccgattggac

SEQ ID NO: 30983 - DNA, 21 bp, synthetic construct
  source 1..21: mol_type = other DNA; mol_type = other DNA
agggatgagtttcaaacctac

SEQ ID NO: 30984 - DNA, 21 bp, synthetic construct
  source 1..21: mol_type = other DNA; mol_type = other DNA
gcggggtatgatagacattgg

SEQ ID NO: 30985 - DNA, 21 bp, synthetic construct
  source 1..21: mol_type = other DNA; mol_type = other DNA
gatctgcgaagttcagattgg

SEQ ID NO: 30986 - DNA, 21 bp, synthetic construct
  source 1..21: mol_type = other DNA; mol_type = other DNA
cgcaatgagtttaccagctat

SEQ ID NO: 30987 - DNA, 21 bp, synthetic construct
  source 1..21: mol_type = other DNA; mol_type = other DNA
aacggaacgaacggacgctgg

SEQ ID NO: 30988 - DNA, 21 bp, synthetic construct
  source 1..21: mol_type = other DNA; mol_type = other DNA
atagctcggaccgggtgggac

SEQ ID NO: 30989 - DNA, 21 bp, synthetic construct
  source 1..21: mol_type = other DNA; mol_type = other DNA
atcgacggcaaagctgggtgt

SEQ ID NO: 30990 - DNA, 21 bp, synthetic construct
  source 1..21: mol_type = other DNA; mol_type = other DNA
tgtaagggcgaatcaagaagt

SEQ ID NO: 30991 - DNA, 21 bp, synthetic construct
  source 1..21: mol_type = other DNA; mol_type = other DNA
tatttcacaggcatgactgca

SEQ ID NO: 30992 - DNA, 21 bp, synthetic construct
  source 1..21: mol_type = other DNA; mol_type = other DNA
agcttcagtaccaatggagtc

SEQ ID NO: 30993 - DNA, 21 bp, synthetic construct
  source 1..21: mol_type = other DNA; mol_type = other DNA
tactggagtcaaataaaggac

SEQ ID NO: 30994 - DNA, 21 bp, synthetic construct
  source 1..21: mol_type = other DNA; mol_type = other DNA
ggcattgcgaatacaatgtgg

SEQ ID NO: 30995 - DNA, 21 bp, synthetic construct
  source 1..21: mol_type = other DNA; mol_type = other DNA
tgcaaatcccttaagtcacca

SEQ ID NO: 30996 - DNA, 21 bp, synthetic construct
  source 1..21: mol_type = other DNA; mol_type = other DNA
gggtgccgccatggagacata

SEQ ID NO: 30997 - DNA, 21 bp, synthetic construct
  source 1..21: mol_type = other DNA; mol_type = other DNA
agagatcaattcacgtcgtat

SEQ ID NO: 30998 - DNA, 21 bp, synthetic construct
  source 1..21: mol_type = other DNA; mol_type = other DNA
gtactttcatctgtttcctgg

SEQ ID NO: 30999 - DNA, 21 bp, synthetic construct
  source 1..21: mol_type = other DNA; mol_type = other DNA
tgcgctccagattaccaggag

SEQ ID NO: 31000 - DNA, 21 bp, synthetic construct
  source 1..21: mol_type = other DNA; mol_type = other DNA
tgtaagccgccgccattgccc

SEQ ID NO: 31001 - DNA, 21 bp, synthetic construct
  source 1..21: mol_type = other DNA; mol_type = other DNA
tattatacggggatacaggaa

SEQ ID NO: 31002 - DNA, 21 bp, synthetic construct
  source 1..21: mol_type = other DNA; mol_type = other DNA
tattggagtggacaaaaagac

SEQ ID NO: 31003 - DNA, 21 bp, synthetic construct
  source 1..21: mol_type = other DNA; mol_type = other DNA
cctggaagcaccagaacatgg

SEQ ID NO: 31004 - DNA, 21 bp, synthetic construct
  source 1..21: mol_type = other DNA; mol_type = other DNA
tctatgcaatcaaggtcgtgg

SEQ ID NO: 31005 - DNA, 21 bp, synthetic construct
  source 1..21: mol_type = other DNA; mol_type = other DNA
tactcacgattgcaccagttg

SEQ ID NO: 31006 - DNA, 21 bp, synthetic construct
  source 1..21: mol_type = other DNA; mol_type = other DNA
atgacggggacttcttgtcag

SEQ ID NO: 31007 - DNA, 21 bp, synthetic construct
  source 1..21: mol_type = other DNA; mol_type = other DNA
tgcaataagaccagcgtgact

SEQ ID NO: 31008 - DNA, 21 bp, synthetic construct
  source 1..21: mol_type = other DNA; mol_type = other DNA
tgtgcaccataccgacatgag

SEQ ID NO: 31009 - DNA, 21 bp, synthetic construct
  source 1..21: mol_type = other DNA; mol_type = other DNA
tttttcagtggtaaagtggag

SEQ ID NO: 31010 - DNA, 21 bp, synthetic construct
  source 1..21: mol_type = other DNA; mol_type = other DNA
cacggcagtggtaatttcgtc

SEQ ID NO: 31011 - DNA, 21 bp, synthetic construct
  source 1..21: mol_type = other DNA; mol_type = other DNA
tgcaagagtgacaaaatcatg

SEQ ID NO: 31012 - DNA, 21 bp, synthetic construct
  source 1..21: mol_type = other DNA; mol_type = other DNA
gcgggtgggggactatacatc

SEQ ID NO: 31013 - DNA, 21 bp, synthetic construct
  source 1..21: mol_type = other DNA; mol_type = other DNA
cgagatgaatttacggtatac

SEQ ID NO: 31014 - DNA, 21 bp, synthetic construct
  source 1..21: mol_type = other DNA; mol_type = other DNA
tatttcagcggtactactgat

SEQ ID NO: 31015 - DNA, 21 bp, synthetic construct
  source 1..21: mol_type = other DNA; mol_type = other DNA
tacgcgcgtcaaggattcaac

SEQ ID NO: 31016 - DNA, 21 bp, synthetic construct
  source 1..21: mol_type = other DNA; mol_type = other DNA
tgccgcgccgaagataagggg

SEQ ID NO: 31017 - DNA, 21 bp, synthetic construct
  source 1..21: mol_type = other DNA; mol_type = other DNA
tgtgtaaaagatgaaggggcg

SEQ ID NO: 31018 - DNA, 21 bp, synthetic construct
  source 1..21: mol_type = other DNA; mol_type = other DNA
agggaaggtgcgtcttattgg

SEQ ID NO: 31019 - DNA, 21 bp, synthetic construct
  source 1..21: mol_type = other DNA; mol_type = other DNA
tattggtctgggaaacaggca

SEQ ID NO: 31020 - DNA, 21 bp, synthetic construct
  source 1..21: mol_type = other DNA; mol_type = other DNA
acttgcaaagctcaaatgggg

SEQ ID NO: 31021 - DNA, 21 bp, synthetic construct
  source 1..21: mol_type = other DNA; mol_type = other DNA
ccttacgccgtaagtcccttg

SEQ ID NO: 31022 - DNA, 21 bp, synthetic construct
  source 1..21: mol_type = other DNA; mol_type = other DNA
cttaagtactcgggaatgtgt

SEQ ID NO: 31023 - DNA, 21 bp, synthetic construct
  source 1..21: mol_type = other DNA; mol_type = other DNA
tactcacgcctcaatatgaac

SEQ ID NO: 31024 - DNA, 21 bp, synthetic construct
  source 1..21: mol_type = other DNA; mol_type = other DNA
atgtgggacggcacgtcacct

SEQ ID NO: 31025 - DNA, 21 bp, synthetic construct
  source 1..21: mol_type = other DNA; mol_type = other DNA
ctacacaggttatcgaacggc

SEQ ID NO: 31026 - DNA, 21 bp, synthetic construct
  source 1..21: mol_type = other DNA; mol_type = other DNA
gcgccgggaagcatcaagtgg

SEQ ID NO: 31027 - DNA, 21 bp, synthetic construct
  source 1..21: mol_type = other DNA; mol_type = other DNA
cgtgcctttgatgcatatgaa

SEQ ID NO: 31028 - DNA, 21 bp, synthetic construct
  source 1..21: mol_type = other DNA; mol_type = other DNA
ggggatggattttctacttgg

SEQ ID NO: 31029 - DNA, 21 bp, synthetic construct
  source 1..21: mol_type = other DNA; mol_type = other DNA
agagacgaatttcatgtgtgg

SEQ ID NO: 31030 - DNA, 21 bp, synthetic construct
  source 1..21: mol_type = other DNA; mol_type = other DNA
tattggactgggaccacagag

SEQ ID NO: 31031 - DNA, 21 bp, synthetic construct
  source 1..21: mol_type = other DNA; mol_type = other DNA
tacagccgtatgggcttgaac

SEQ ID NO: 31032 - DNA, 21 bp, synthetic construct
  source 1..21: mol_type = other DNA; mol_type = other DNA
tatagcaagcacaacatgaac

SEQ ID NO: 31033 - DNA, 21 bp, synthetic construct
  source 1..21: mol_type = other DNA; mol_type = other DNA
tattggcatggagttgttgac

SEQ ID NO: 31034 - DNA, 21 bp, synthetic construct
  source 1..21: mol_type = other DNA; mol_type = other DNA
tttagccgcgctaatcataac

SEQ ID NO: 31035 - DNA, 21 bp, synthetic construct
  source 1..21: mol_type = other DNA; mol_type = other DNA
tttagcaaagctaactacaat

SEQ ID NO: 31036 - DNA, 21 bp, synthetic construct
  source 1..21: mol_type = other DNA; mol_type = other DNA
tgtagaaatggacaacccgcc

SEQ ID NO: 31037 - DNA, 21 bp, synthetic construct
  source 1..21: mol_type = other DNA; mol_type = other DNA
atgctagcgtctagtacgtgg

SEQ ID NO: 31038 - DNA, 21 bp, synthetic construct
  source 1..21: mol_type = other DNA; mol_type = other DNA
gtaggtaacaggggttgggac

SEQ ID NO: 31039 - DNA, 21 bp, synthetic construct
  source 1..21: mol_type = other DNA; mol_type = other DNA
tgccgtgatgagaacaagccc

SEQ ID NO: 31040 - DNA, 21 bp, synthetic construct
  source 1..21: mol_type = other DNA; mol_type = other DNA
tattttacgggcttaagggat

SEQ ID NO: 31041 - DNA, 21 bp, synthetic construct
  source 1..21: mol_type = other DNA; mol_type = other DNA
gtaccgtacgaaggtattggt

SEQ ID NO: 31042 - DNA, 21 bp, synthetic construct
  source 1..21: mol_type = other DNA; mol_type = other DNA
tatttcgcgggacgcacatcc

SEQ ID NO: 31043 - DNA, 21 bp, synthetic construct
  source 1..21: mol_type = other DNA; mol_type = other DNA
tttttcaccgggaaggtctca

SEQ ID NO: 31044 - DNA, 21 bp, synthetic construct
  source 1..21: mol_type = other DNA; mol_type = other DNA
tgcaaacccccaccccttcca

SEQ ID NO: 31045 - DNA, 21 bp, synthetic construct
  source 1..21: mol_type = other DNA; mol_type = other DNA
ccttatgccaaatcatctgag

SEQ ID NO: 31046 - DNA, 21 bp, synthetic construct
  source 1..21: mol_type = other DNA; mol_type = other DNA
tacagcaggcagggcccgaac

SEQ ID NO: 31047 - DNA, 21 bp, synthetic construct
  source 1..21: mol_type = other DNA; mol_type = other DNA
tatgtgcgttccgacgcaggg

SEQ ID NO: 31048 - DNA, 21 bp, synthetic construct
  source 1..21: mol_type = other DNA; mol_type = other DNA
tattctagagtccaagatgat

SEQ ID NO: 31049 - DNA, 21 bp, synthetic construct
  source 1..21: mol_type = other DNA; mol_type = other DNA
tgtaagccaggagaaggtgcg

SEQ ID NO: 31050 - DNA, 21 bp, synthetic construct
  source 1..21: mol_type = other DNA; mol_type = other DNA
acagtaagcacgaacggaata

SEQ ID NO: 31051 - DNA, 21 bp, synthetic construct
  source 1..21: mol_type = other DNA; mol_type = other DNA
taccatcgccttggagatacc

SEQ ID NO: 31052 - DNA, 21 bp, synthetic construct
  source 1..21: mol_type = other DNA; mol_type = other DNA
cagggggaatcgagggtatgg

SEQ ID NO: 31053 - DNA, 21 bp, synthetic construct
  source 1..21: mol_type = other DNA; mol_type = other DNA
tactttagcggcatgcactcg

SEQ ID NO: 31054 - DNA, 21 bp, synthetic construct
  source 1..21: mol_type = other DNA; mol_type = other DNA
cgcctcgaatccgccgggtgg

SEQ ID NO: 31055 - DNA, 21 bp, synthetic construct
  source 1..21: mol_type = other DNA; mol_type = other DNA
ttgcatcgtctcagcaatggt

SEQ ID NO: 31056 - DNA, 21 bp, synthetic construct
  source 1..21: mol_type = other DNA; mol_type = other DNA
tgtaagccccccatgggtgca

SEQ ID NO: 31057 - DNA, 21 bp, synthetic construct
  source 1..21: mol_type = other DNA; mol_type = other DNA
cgggacggagaatcaaagtgg

SEQ ID NO: 31058 - DNA, 21 bp, synthetic construct
  source 1..21: mol_type = other DNA; mol_type = other DNA
tacttcaccggtaggttcgat

SEQ ID NO: 31059 - DNA, 21 bp, synthetic construct
  source 1..21: mol_type = other DNA; mol_type = other DNA
tacgcaaaaggggggtttaat

SEQ ID NO: 31060 - DNA, 21 bp, synthetic construct
  source 1..21: mol_type = other DNA; mol_type = other DNA
tgcaaaacaaagtcccaagaa

SEQ ID NO: 31061 - DNA, 21 bp, synthetic construct
  source 1..21: mol_type = other DNA; mol_type = other DNA
tattggtccggcacagtttcc

SEQ ID NO: 31062 - DNA, 21 bp, synthetic construct
  source 1..21: mol_type = other DNA; mol_type = other DNA
cacgcgcgacagagtcccaat

SEQ ID NO: 31063 - DNA, 21 bp, synthetic construct
  source 1..21: mol_type = other DNA; mol_type = other DNA
tgtatgtctagggcagtagca

SEQ ID NO: 31064 - DNA, 21 bp, synthetic construct
  source 1..21: mol_type = other DNA; mol_type = other DNA
tactggtcagccgtgactgct

SEQ ID NO: 31065 - DNA, 21 bp, synthetic construct
  source 1..21: mol_type = other DNA; mol_type = other DNA
tacttccacggaaagcaggac

SEQ ID NO: 31066 - DNA, 21 bp, synthetic construct
  source 1..21: mol_type = other DNA; mol_type = other DNA
tactttcaaggcaaaattgcc

SEQ ID NO: 31067 - DNA, 21 bp, synthetic construct
  source 1..21: mol_type = other DNA; mol_type = other DNA
tattccagaggcaataataat

SEQ ID NO: 31068 - DNA, 21 bp, synthetic construct
  source 1..21: mol_type = other DNA; mol_type = other DNA
tactctaagatcggtagggat

SEQ ID NO: 31069 - DNA, 21 bp, synthetic construct
  source 1..21: mol_type = other DNA; mol_type = other DNA
tgccgagaaggcacgagtagc

SEQ ID NO: 31070 - DNA, 21 bp, synthetic construct
  source 1..21: mol_type = other DNA; mol_type = other DNA
tatttcagtgggcaacaccac

SEQ ID NO: 31071 - DNA, 21 bp, synthetic construct
  source 1..21: mol_type = other DNA; mol_type = other DNA
tactcaagaatgaatgagaac

SEQ ID NO: 31072 - DNA, 21 bp, synthetic construct
  source 1..21: mol_type = other DNA; mol_type = other DNA
tattgggaaggcgtcaaggct

SEQ ID NO: 31073 - DNA, 21 bp, synthetic construct
  source 1..21: mol_type = other DNA; mol_type = other DNA
tgccggaacggccagcctgct

SEQ ID NO: 31074 - DNA, 21 bp, synthetic construct
  source 1..21: mol_type = other DNA; mol_type = other DNA
gttatgcccagcgcggtttgg

SEQ ID NO: 31075 - DNA, 21 bp, synthetic construct
  source 1..21: mol_type = other DNA; mol_type = other DNA
tttaagtcgaccaacggggtt

SEQ ID NO: 31076 - DNA, 21 bp, synthetic construct
  source 1..21: mol_type = other DNA; mol_type = other DNA
tacgcacgcctcggcagcaat

SEQ ID NO: 31077 - DNA, 21 bp, synthetic construct
  source 1..21: mol_type = other DNA; mol_type = other DNA
tacgattctactaacggtatt

SEQ ID NO: 31078 - DNA, 21 bp, synthetic construct
  source 1..21: mol_type = other DNA; mol_type = other DNA
ctcgcgaaatccggtactaac

SEQ ID NO: 31079 - DNA, 21 bp, synthetic construct
  source 1..21: mol_type = other DNA; mol_type = other DNA
ttagcaaaaaccggtactaac

SEQ ID NO: 31080 - DNA, 21 bp, synthetic construct
  source 1..21: mol_type = other DNA; mol_type = other DNA
tattatagcggaattcagtcg

SEQ ID NO: 31081 - DNA, 21 bp, synthetic construct
  source 1..21: mol_type = other DNA; mol_type = other DNA
tgtaagggaagggatattgac

SEQ ID NO: 31082 - DNA, 21 bp, synthetic construct
  source 1..21: mol_type = other DNA; mol_type = other DNA
tggtctgccattacagactgt

SEQ ID NO: 31083 - DNA, 21 bp, synthetic construct
  source 1..21: mol_type = other DNA; mol_type = other DNA
ctacacaaattgtcgactcac

SEQ ID NO: 31084 - DNA, 21 bp, synthetic construct
  source 1..21: mol_type = other DNA; mol_type = other DNA
agaacttttgattctttcgag

SEQ ID NO: 31085 - DNA, 21 bp, synthetic construct
  source 1..21: mol_type = other DNA; mol_type = other DNA
aaacccgatcacgttaggtgg

SEQ ID NO: 31086 - DNA, 21 bp, synthetic construct
  source 1..21: mol_type = other DNA; mol_type = other DNA
tattctaaattaggcgcagat

SEQ ID NO: 31087 - DNA, 21 bp, synthetic construct
  source 1..21: mol_type = other DNA; mol_type = other DNA
tggtggcatggaattcctgag

SEQ ID NO: 31088 - DNA, 21 bp, synthetic construct
  source 1..21: mol_type = other DNA; mol_type = other DNA
cgtacttacgacacgtaccca

SEQ ID NO: 31089 - DNA, 21 bp, synthetic construct
  source 1..21: mol_type = other DNA; mol_type = other DNA
agtctaagcgataggacatgg

SEQ ID NO: 31090 - DNA, 21 bp, synthetic construct
  source 1..21: mol_type = other DNA; mol_type = other DNA
tatttttcaggtgtgagaacc

SEQ ID NO: 31091 - DNA, 21 bp, synthetic construct
  source 1..21: mol_type = other DNA; mol_type = other DNA
atgacaacgtgtgaaaacgta

SEQ ID NO: 31092 - DNA, 21 bp, synthetic construct
  source 1..21: mol_type = other DNA; mol_type = other DNA
gatatgctgtcgagtagctgg

SEQ ID NO: 31093 - DNA, 21 bp, synthetic construct
  source 1..21: mol_type = other DNA; mol_type = other DNA
agaaacatgtcggtgtaccca

SEQ ID NO: 31094 - DNA, 21 bp, synthetic construct
  source 1..21: mol_type = other DNA; mol_type = other DNA
cgtggcgatttccacatgtac

SEQ ID NO: 31095 - DNA, 21 bp, synthetic construct
  source 1..21: mol_type = other DNA; mol_type = other DNA
tactcaaaaatcggcaaagac

SEQ ID NO: 31096 - DNA, 21 bp, synthetic construct
  source 1..21: mol_type = other DNA; mol_type = other DNA
gatttgcaggcacacgactgg

SEQ ID NO: 31097 - DNA, 21 bp, synthetic construct
  source 1..21: mol_type = other DNA; mol_type = other DNA
tattggcaaggaaagattgcg

SEQ ID NO: 31098 - DNA, 21 bp, synthetic construct
  source 1..21: mol_type = other DNA; mol_type = other DNA
tgcaaacctcaatggccttca

SEQ ID NO: 31099 - DNA, 21 bp, synthetic construct
  source 1..21: mol_type = other DNA; mol_type = other DNA
tattcgcggcttaattcgaac

SEQ ID NO: 31100 - DNA, 21 bp, synthetic construct
  source 1..21: mol_type = other DNA; mol_type = other DNA
gcgcaatcgactaacggggtg

SEQ ID NO: 31101 - DNA, 21 bp, synthetic construct
  source 1..21: mol_type = other DNA; mol_type = other DNA
caggggaatggactatatcga

SEQ ID NO: 31102 - DNA, 21 bp, synthetic construct
  source 1..21: mol_type = other DNA; mol_type = other DNA
tgcaaacctcctatgggcgct

SEQ ID NO: 31103 - DNA, 21 bp, synthetic construct
  source 1..21: mol_type = other DNA; mol_type = other DNA
tgggttaggtcccaacccggt

SEQ ID NO: 31104 - DNA, 21 bp, synthetic construct
  source 1..21: mol_type = other DNA; mol_type = other DNA
tgtaagccagatagcatagga

SEQ ID NO: 31105 - DNA, 21 bp, synthetic construct
  source 1..21: mol_type = other DNA; mol_type = other DNA
cgcggagtcgatatgtaccct

SEQ ID NO: 31106 - DNA, 21 bp, synthetic construct
  source 1..21: mol_type = other DNA; mol_type = other DNA
tacgcgcgacatggaccgaat

SEQ ID NO: 31107 - DNA, 21 bp, synthetic construct
  source 1..21: mol_type = other DNA; mol_type = other DNA
aaatatgatcatgtcacgtgg

SEQ ID NO: 31108 - DNA, 21 bp, synthetic construct
  source 1..21: mol_type = other DNA; mol_type = other DNA
atgactggtacctcttgcctg

SEQ ID NO: 31109 - DNA, 21 bp, synthetic construct
  source 1..21: mol_type = other DNA; mol_type = other DNA
tactgggagggagtgaaagcc

SEQ ID NO: 31110 - DNA, 21 bp, synthetic construct
  source 1..21: mol_type = other DNA; mol_type = other DNA
tgcaagtccactaatggaatc

SEQ ID NO: 31111 - DNA, 21 bp, synthetic construct
  source 1..21: mol_type = other DNA; mol_type = other DNA
tacttaaagtctcagtcgatt

SEQ ID NO: 31112 - DNA, 21 bp, synthetic construct
  source 1..21: mol_type = other DNA; mol_type = other DNA
cgtacttatgatagtatcgca

SEQ ID NO: 31113 - DNA, 21 bp, synthetic construct
  source 1..21: mol_type = other DNA; mol_type = other DNA
tattttagcggtcaaaacaac

SEQ ID NO: 31114 - DNA, 21 bp, synthetic construct
  source 1..21: mol_type = other DNA; mol_type = other DNA
tgcaccgagaaaacgggtcat

SEQ ID NO: 31115 - DNA, 21 bp, synthetic construct
  source 1..21: mol_type = other DNA; mol_type = other DNA
tgcaaaccgaggcagccagaa

SEQ ID NO: 31116 - DNA, 21 bp, synthetic construct
  source 1..21: mol_type = other DNA; mol_type = other DNA
ggcagtgaattctcagccttc

SEQ ID NO: 31117 - DNA, 21 bp, synthetic construct
  source 1..21: mol_type = other DNA; mol_type = other DNA
aaaatggactattcggtgttt

SEQ ID NO: 31118 - DNA, 21 bp, synthetic construct
  source 1..21: mol_type = other DNA; mol_type = other DNA
acggacgaaacagtctatagc

SEQ ID NO: 31119 - DNA, 21 bp, synthetic construct
  source 1..21: mol_type = other DNA; mol_type = other DNA
tacttccatggaaccgtggaa

SEQ ID NO: 31120 - DNA, 21 bp, synthetic construct
  source 1..21: mol_type = other DNA; mol_type = other DNA
tactttactggtacacagttg

SEQ ID NO: 31121 - DNA, 21 bp, synthetic construct
  source 1..21: mol_type = other DNA; mol_type = other DNA
tatgccaggggaaacatcaac

SEQ ID NO: 31122 - DNA, 21 bp, synthetic construct
  source 1..21: mol_type = other DNA; mol_type = other DNA
tactactcagggatacaaagt

SEQ ID NO: 31123 - DNA, 21 bp, synthetic construct
  source 1..21: mol_type = other DNA; mol_type = other DNA
agggaatataatgtttatcct

SEQ ID NO: 31124 - DNA, 21 bp, synthetic construct
  source 1..21: mol_type = other DNA; mol_type = other DNA
tacgcgaggaatggacaaaac

SEQ ID NO: 31125 - DNA, 21 bp, synthetic construct
  source 1..21: mol_type = other DNA; mol_type = other DNA
aaagaagactatgttacttac

SEQ ID NO: 31126 - DNA, 21 bp, synthetic construct
  source 1..21: mol_type = other DNA; mol_type = other DNA
tactccagaatttgccctaac

SEQ ID NO: 31127 - DNA, 21 bp, synthetic construct
  source 1..21: mol_type = other DNA; mol_type = other DNA
tattttagcggaaaggcgctc

SEQ ID NO: 31128 - DNA, 21 bp, synthetic construct
  source 1..21: mol_type = other DNA; mol_type = other DNA
acggtttctacaaatgggatc

SEQ ID NO: 31129 - DNA, 21 bp, synthetic construct
  source 1..21: mol_type = other DNA; mol_type = other DNA
tactggtccggccaaatcgct

SEQ ID NO: 31130 - DNA, 21 bp, synthetic construct
  source 1..21: mol_type = other DNA; mol_type = other DNA
aagctcggtggatcatgtggc

SEQ ID NO: 31131 - DNA, 21 bp, synthetic construct
  source 1..21: mol_type = other DNA; mol_type = other DNA
tattcgcgcgcaggtgggaat

SEQ ID NO: 31132 - DNA, 21 bp, synthetic construct
  source 1..21: mol_type = other DNA; mol_type = other DNA
atcaagtcgaccaatggcatt

SEQ ID NO: 31133 - DNA, 21 bp, synthetic construct
  source 1..21: mol_type = other DNA; mol_type = other DNA
tatcaaagtactaatggcatt

SEQ ID NO: 31134 - DNA, 21 bp, synthetic construct
  source 1..21: mol_type = other DNA; mol_type = other DNA
tgcagcgtcgttacgggctcg

SEQ ID NO: 31135 - DNA, 21 bp, synthetic construct
  source 1..21: mol_type = other DNA; mol_type = other DNA
agaacttatgaaacgtttcct

SEQ ID NO: 31136 - DNA, 21 bp, synthetic construct
  source 1..21: mol_type = other DNA; mol_type = other DNA
ttccatcgcttaagtgatgac

SEQ ID NO: 31137 - DNA, 21 bp, synthetic construct
  source 1..21: mol_type = other DNA; mol_type = other DNA
cgagactacgattcgtaccct

SEQ ID NO: 31138 - DNA, 21 bp, synthetic construct
  source 1..21: mol_type = other DNA; mol_type = other DNA
tactttactgggcaggcctcg

SEQ ID NO: 31139 - DNA, 21 bp, synthetic construct
  source 1..21: mol_type = other DNA; mol_type = other DNA
tattcaagggtcgggggaaac

SEQ ID NO: 31140 - DNA, 21 bp, synthetic construct
  source 1..21: mol_type = other DNA; mol_type = other DNA
tattccagggtcaatccgaat

SEQ ID NO: 31141 - DNA, 21 bp, synthetic construct
  source 1..21: mol_type = other DNA; mol_type = other DNA
tatgctaggaccaattacaat

SEQ ID NO: 31142 - DNA, 21 bp, synthetic construct
  source 1..21: mol_type = other DNA; mol_type = other DNA
ttgcacaaattgcagccatgt

SEQ ID NO: 31143 - DNA, 21 bp, synthetic construct
  source 1..21: mol_type = other DNA; mol_type = other DNA
tattacacgggattcgtagat

SEQ ID NO: 31144 - DNA, 21 bp, synthetic construct
  source 1..21: mol_type = other DNA; mol_type = other DNA
cgtaacgagtttacgggattt

SEQ ID NO: 31145 - DNA, 21 bp, synthetic construct
  source 1..21: mol_type = other DNA; mol_type = other DNA
ttctggcatggagtgcctgat

SEQ ID NO: 31146 - DNA, 21 bp, synthetic construct
  source 1..21: mol_type = other DNA; mol_type = other DNA
tatagtagatccaatgtaaat

SEQ ID NO: 31147 - DNA, 21 bp, synthetic construct
  source 1..21: mol_type = other DNA; mol_type = other DNA
tattattcagggcagaaggag

SEQ ID NO: 31148 - DNA, 21 bp, synthetic construct
  source 1..21: mol_type = other DNA; mol_type = other DNA
aggggggaatcgagctcatgg

SEQ ID NO: 31149 - DNA, 21 bp, synthetic construct
  source 1..21: mol_type = other DNA; mol_type = other DNA
tatttcgcaggtactcatgac

SEQ ID NO: 31150 - DNA, 21 bp, synthetic construct
  source 1..21: mol_type = other DNA; mol_type = other DNA
agatcggaattccgtacatac

SEQ ID NO: 31151 - DNA, 21 bp, synthetic construct
  source 1..21: mol_type = other DNA; mol_type = other DNA
atgaccggcatctcatgtcta

SEQ ID NO: 31152 - DNA, 21 bp, synthetic construct
  source 1..21: mol_type = other DNA; mol_type = other DNA
tattggacgggctgcatggag

SEQ ID NO: 31153 - DNA, 21 bp, synthetic construct
  source 1..21: mol_type = other DNA; mol_type = other DNA
tggcctagtggtagcgccggg

SEQ ID NO: 31154 - DNA, 21 bp, synthetic construct
  source 1..21: mol_type = other DNA; mol_type = other DNA
tatttcacaggctgtcaagct

SEQ ID NO: 31155 - DNA, 21 bp, synthetic construct
  source 1..21: mol_type = other DNA; mol_type = other DNA
ggagaacctacctgtaaggcc

SEQ ID NO: 31156 - DNA, 21 bp, synthetic construct
  source 1..21: mol_type = other DNA; mol_type = other DNA
attcagagttccaacggggtg

SEQ ID NO: 31157 - DNA, 21 bp, synthetic construct
  source 1..21: mol_type = other DNA; mol_type = other DNA
taccaccgactcaatgagcat

SEQ ID NO: 31158 - DNA, 21 bp, synthetic construct
  source 1..21: mol_type = other DNA; mol_type = other DNA
tacgcaaaacaaggcgctaat

SEQ ID NO: 31159 - DNA, 21 bp, synthetic construct
  source 1..21: mol_type = other DNA; mol_type = other DNA
ggcggtgaaggaacacgctgg

SEQ ID NO: 31160 - DNA, 21 bp, synthetic construct
  source 1..21: mol_type = other DNA; mol_type = other DNA
tgtactagcaaatacggtcat

SEQ ID NO: 31161 - DNA, 21 bp, synthetic construct
  source 1..21: mol_type = other DNA; mol_type = other DNA
ttggacgactggaccacctat

SEQ ID NO: 31162 - DNA, 21 bp, synthetic construct
  source 1..21: mol_type = other DNA; mol_type = other DNA
tactttacaggggtaactgtc

SEQ ID NO: 31163 - DNA, 21 bp, synthetic construct
  source 1..21: mol_type = other DNA; mol_type = other DNA
tgtaaggcccctagcgctggg

SEQ ID NO: 31164 - DNA, 21 bp, synthetic construct
  source 1..21: mol_type = other DNA; mol_type = other DNA
gatatggagtcaagtaagtgg

SEQ ID NO: 31165 - DNA, 21 bp, synthetic construct
  source 1..21: mol_type = other DNA; mol_type = other DNA
tatcatcggttgaacgaacac

SEQ ID NO: 31166 - DNA, 21 bp, synthetic construct
  source 1..21: mol_type = other DNA; mol_type = other DNA
tatagtagagccaacatgaat

SEQ ID NO: 31167 - DNA, 21 bp, synthetic construct
  source 1..21: mol_type = other DNA; mol_type = other DNA
gctaactcaacgaacggagtc

SEQ ID NO: 31168 - DNA, 21 bp, synthetic construct
  source 1..21: mol_type = other DNA; mol_type = other DNA
tacttttcagggcagattgta

SEQ ID NO: 31169 - DNA, 21 bp, synthetic construct
  source 1..21: mol_type = other DNA; mol_type = other DNA
tgtaagcctgatgcggtaaga

SEQ ID NO: 31170 - DNA, 21 bp, synthetic construct
  source 1..21: mol_type = other DNA; mol_type = other DNA
atgactggcaccagttgccga

SEQ ID NO: 31171 - DNA, 21 bp, synthetic construct
  source 1..21: mol_type = other DNA; mol_type = other DNA
acagacggtactagtttatgg

SEQ ID NO: 31172 - DNA, 21 bp, synthetic construct
  source 1..21: mol_type = other DNA; mol_type = other DNA
tatttttcaggaacgaccgac

SEQ ID NO: 31173 - DNA, 21 bp, synthetic construct
  source 1..21: mol_type = other DNA; mol_type = other DNA
tactggactggcaagcacgaa

SEQ ID NO: 31174 - DNA, 21 bp, synthetic construct
  source 1..21: mol_type = other DNA; mol_type = other DNA
ctccacaagctatgccaagat

SEQ ID NO: 31175 - DNA, 21 bp, synthetic construct
  source 1..21: mol_type = other DNA; mol_type = other DNA
ggaggagagggtactagatgg

SEQ ID NO: 31176 - DNA, 21 bp, synthetic construct
  source 1..21: mol_type = other DNA; mol_type = other DNA
atcgctgcactgggttgggat

SEQ ID NO: 31177 - DNA, 21 bp, synthetic construct
  source 1..21: mol_type = other DNA; mol_type = other DNA
ctggcaagattgggatgggat

SEQ ID NO: 31178 - DNA, 21 bp, synthetic construct
  source 1..21: mol_type = other DNA; mol_type = other DNA
tactctaagcagggctggaac

SEQ ID NO: 31179 - DNA, 21 bp, synthetic construct
  source 1..21: mol_type = other DNA; mol_type = other DNA
aggggaagcgagaggatctgt

SEQ ID NO: 31180 - DNA, 21 bp, synthetic construct
  source 1..21: mol_type = other DNA; mol_type = other DNA
tactcgagacaagggatgaac

SEQ ID NO: 31181 - DNA, 21 bp, synthetic construct
  source 1..21: mol_type = other DNA; mol_type = other DNA
tatgcccgcaatggacataat

SEQ ID NO: 31182 - DNA, 21 bp, synthetic construct
  source 1..21: mol_type = other DNA; mol_type = other DNA
tactttagcggccttattgac

SEQ ID NO: 31183 - DNA, 21 bp, synthetic construct
  source 1..21: mol_type = other DNA; mol_type = other DNA
cgtgacggacaaagcgcatat

SEQ ID NO: 31184 - DNA, 21 bp, synthetic construct
  source 1..21: mol_type = other DNA; mol_type = other DNA
agagatcaatatgtctaccca

SEQ ID NO: 31185 - DNA, 21 bp, synthetic construct
  source 1..21: mol_type = other DNA; mol_type = other DNA
tatcatcgactggggagtact

SEQ ID NO: 31186 - DNA, 21 bp, synthetic construct
  source 1..21: mol_type = other DNA; mol_type = other DNA
cactggagcacaaacggaatt

SEQ ID NO: 31187 - DNA, 21 bp, synthetic construct
  source 1..21: mol_type = other DNA; mol_type = other DNA
tattcaaggttaggaggaaac

SEQ ID NO: 31188 - DNA, 21 bp, synthetic construct
  source 1..21: mol_type = other DNA; mol_type = other DNA
aaggatggatacacctcgtgg

SEQ ID NO: 31189 - DNA, 21 bp, synthetic construct
  source 1..21: mol_type = other DNA; mol_type = other DNA
tgcaaggcaaatcgtgttgaa

SEQ ID NO: 31190 - DNA, 21 bp, synthetic construct
  source 1..21: mol_type = other DNA; mol_type = other DNA
gtgatggaggcccgccaatgg

SEQ ID NO: 31191 - DNA, 21 bp, synthetic construct
  source 1..21: mol_type = other DNA; mol_type = other DNA
tattggggagggatacccgat

SEQ ID NO: 31192 - DNA, 21 bp, synthetic construct
  source 1..21: mol_type = other DNA; mol_type = other DNA
tactggtccgggactcacgaa

SEQ ID NO: 31193 - DNA, 21 bp, synthetic construct
  source 1..21: mol_type = other DNA; mol_type = other DNA
tactcaaaaattggttgggac

SEQ ID NO: 31194 - DNA, 21 bp, synthetic construct
  source 1..21: mol_type = other DNA; mol_type = other DNA
cttgcgcgtacaggcaacgat

SEQ ID NO: 31195 - DNA, 21 bp, synthetic construct
  source 1..21: mol_type = other DNA; mol_type = other DNA
tattccagatcgggtacaaat

SEQ ID NO: 31196 - DNA, 21 bp, synthetic construct
  source 1..21: mol_type = other DNA; mol_type = other DNA
agaggggatgaggtctacccc

SEQ ID NO: 31197 - DNA, 21 bp, synthetic construct
  source 1..21: mol_type = other DNA; mol_type = other DNA
gggttagccagttcaacctgg

SEQ ID NO: 31198 - DNA, 21 bp, synthetic construct
  source 1..21: mol_type = other DNA; mol_type = other DNA
tgcaaatcatcgtgtaaacct

SEQ ID NO: 31199 - DNA, 21 bp, synthetic construct
  source 1..21: mol_type = other DNA; mol_type = other DNA
catgttactacccactgcagt

SEQ ID NO: 31200 - DNA, 21 bp, synthetic construct
  source 1..21: mol_type = other DNA; mol_type = other DNA
tgcaaattgtccagtaaagca

SEQ ID NO: 31201 - DNA, 21 bp, synthetic construct
  source 1..21: mol_type = other DNA; mol_type = other DNA
tactttagcggcgttagaaat

SEQ ID NO: 31202 - DNA, 21 bp, synthetic construct
  source 1..21: mol_type = other DNA; mol_type = other DNA
ctcaccaggcttaatccggac

SEQ ID NO: 31203 - DNA, 21 bp, synthetic construct
  source 1..21: mol_type = other DNA; mol_type = other DNA
tggacgcctatctgcaaagcc

SEQ ID NO: 31204 - DNA, 21 bp, synthetic construct
  source 1..21: mol_type = other DNA; mol_type = other DNA
ctagccaggagcggggacaac

SEQ ID NO: 31205 - DNA, 21 bp, synthetic construct
  source 1..21: mol_type = other DNA; mol_type = other DNA
ttaacacgcttaaaccctgat

SEQ ID NO: 31206 - DNA, 21 bp, synthetic construct
  source 1..21: mol_type = other DNA; mol_type = other DNA
tgtttagcgatgtcgaagccc

SEQ ID NO: 31207 - DNA, 21 bp, synthetic construct
  source 1..21: mol_type = other DNA; mol_type = other DNA
tattcgagacaagggttaaat

SEQ ID NO: 31208 - DNA, 21 bp, synthetic construct
  source 1..21: mol_type = other DNA; mol_type = other DNA
tatagtagagttaataataat

SEQ ID NO: 31209 - DNA, 21 bp, synthetic construct
  source 1..21: mol_type = other DNA; mol_type = other DNA
acacacggtacaagcacgtgt

SEQ ID NO: 31210 - DNA, 21 bp, synthetic construct
  source 1..21: mol_type = other DNA; mol_type = other DNA
tacgctaaaatgggatacaat

SEQ ID NO: 31211 - DNA, 21 bp, synthetic construct
  source 1..21: mol_type = other DNA; mol_type = other DNA
cgggaagacgcgataagatgg

SEQ ID NO: 31212 - DNA, 21 bp, synthetic construct
  source 1..21: mol_type = other DNA; mol_type = other DNA
aaaactgagttctgtgctgct

SEQ ID NO: 31213 - DNA, 21 bp, synthetic construct
  source 1..21: mol_type = other DNA; mol_type = other DNA
tatagccgagcaaatttcaat

SEQ ID NO: 31214 - DNA, 21 bp, synthetic construct
  source 1..21: mol_type = other DNA; mol_type = other DNA
tgcaagggagacaagcatgga

SEQ ID NO: 31215 - DNA, 21 bp, synthetic construct
  source 1..21: mol_type = other DNA; mol_type = other DNA
tctttcagtacgaacggaatc

SEQ ID NO: 31216 - DNA, 21 bp, synthetic construct
  source 1..21: mol_type = other DNA; mol_type = other DNA
tactatagcggcgttatctct

SEQ ID NO: 31217 - DNA, 21 bp, synthetic construct
  source 1..21: mol_type = other DNA; mol_type = other DNA
agggaagagtctgtgtttcca

SEQ ID NO: 31218 - DNA, 21 bp, synthetic construct
  source 1..21: mol_type = other DNA; mol_type = other DNA
aaggatgactttcttacgtgg

SEQ ID NO: 31219 - DNA, 21 bp, synthetic construct
  source 1..21: mol_type = other DNA; mol_type = other DNA
tactggagtggaaagactgag

SEQ ID NO: 31220 - DNA, 21 bp, synthetic construct
  source 1..21: mol_type = other DNA
tatagccgcttaggtatgaat

SEQ ID NO: 31221 - DNA, 21 bp, synthetic construct
  source 1..21: mol_type = other DNA
gacatgggctcgagtgtttgg

SEQ ID NO: 31222 - DNA, 21 bp, synthetic construct
  source 1..21: mol_type = other DNA; mol_type = other DNA
tatagcagatcaaatttaaac

SEQ ID NO: 31223 - DNA, 21 bp, synthetic construct
  source 1..21: mol_type = other DNA
tacgctagggctggtaataac

SEQ ID NO: 31224 - DNA, 21 bp, synthetic construct
  source 1..21: mol_type = other DNA
tgcaaggccgttgcccctcca

SEQ ID NO: 31225 - DNA, 21 bp, synthetic construct
  source 1..21: mol_type = other DNA
ttttggagtggagtgtcggaa

SEQ ID NO: 31226 - DNA, 21 bp, synthetic construct
  source 1..21: mol_type = other DNA
tttcgcggtaattgtggtcct

SEQ ID NO: 31227 - DNA, 21 bp, synthetic construct
  source 1..21: mol_type = other DNA
cgggacggagccagtggttgg

SEQ ID NO: 31228 - DNA, 21 bp, synthetic construct
  source 1..21: mol_type = other DNA
tatagcaagataggcttcgac

SEQ ID NO: 31229 - DNA, 21 bp, synthetic construct
  source 1..21: mol_type = other DNA
aaggatgactactcctattac

SEQ ID NO: 31230 - DNA, 21 bp, synthetic construct
  source 1..21: mol_type = other DNA; mol_type = other DNA
ccagggtcaaccaatggagtt

SEQ ID NO: 31231 - DNA, 21 bp, synthetic construct
  source 1..21: mol_type = other DNA; mol_type = other DNA
tacagtcgtagtggcaccaac

SEQ ID NO: 31232 - DNA, 21 bp, synthetic construct
  source 1..21: mol_type = other DNA; mol_type = other DNA
ttcttttccggtattcacgca

SEQ ID NO: 31233 - DNA, 21 bp, synthetic construct
  source 1..21: mol_type = other DNA; mol_type = other DNA
tatcacaagaacaacgcgaat

SEQ ID NO: 31234 - DNA, 21 bp, synthetic construct
  source 1..21: mol_type = other DNA; mol_type = other DNA
ttcaatagcaccaatggcaga

SEQ ID NO: 31235 - DNA, 21 bp, synthetic construct
  source 1..21: mol_type = other DNA; mol_type = other DNA
tgtaaacctcaaatgggaaca

SEQ ID NO: 31236 - DNA, 21 bp, synthetic construct
  source 1..21: mol_type = other DNA; mol_type = other DNA
tattggaccggaaccttggaa

SEQ ID NO: 31237 - DNA, 21 bp, synthetic construct
  source 1..21: mol_type = other DNA; mol_type = other DNA
tactggacgggtcaggtggcg

SEQ ID NO: 31238 - DNA, 21 bp, synthetic construct
  source 1..21: mol_type = other DNA; mol_type = other DNA
tatcctttcccgacagaagcc

SEQ ID NO: 31239 - DNA, 21 bp, synthetic construct
  source 1..21: mol_type = other DNA; mol_type = other DNA
atgtcaagggccagctataat

SEQ ID NO: 31240 - DNA, 21 bp, synthetic construct
  source 1..21: mol_type = other DNA; mol_type = other DNA
gcaatggaaagctccaattgg

SEQ ID NO: 31241 - DNA, 21 bp, synthetic construct
  source 1..21: mol_type = other DNA; mol_type = other DNA
agaacatacgatacatacatc

SEQ ID NO: 31242 - DNA, 21 bp, synthetic construct
  source 1..21: mol_type = other DNA; mol_type = other DNA
ctggccaaggctggatataac

SEQ ID NO: 31243 - DNA, 21 bp, synthetic construct
  source 1..21: mol_type = other DNA; mol_type = other DNA
tggcaacccatgtgtaaggct

SEQ ID NO: 31244 - DNA, 21 bp, synthetic construct
  source 1..21: mol_type = other DNA; mol_type = other DNA
tttgcaagaactgggattaac

SEQ ID NO: 31245 - DNA, 21 bp, synthetic construct
  source 1..21: mol_type = other DNA; mol_type = other DNA
gtggggagcgataggggttgg

SEQ ID NO: 31246 - DNA, 21 bp, synthetic construct
  source 1..21: mol_type = other DNA; mol_type = other DNA
tatttcaccggaactcaactt

SEQ ID NO: 31247 - DNA, 21 bp, synthetic construct
  source 1..21: mol_type = other DNA; mol_type = other DNA
tattttagcgccgtcaaggag

SEQ ID NO: 31248 - DNA, 21 bp, synthetic construct
  source 1..21: mol_type = other DNA; mol_type = other DNA
tacacccgagtgcaggagaac

SEQ ID NO: 31249 - DNA, 21 bp, synthetic construct
  source 1..21: mol_type = other DNA; mol_type = other DNA
tgtccgaagacaaagttggag

SEQ ID NO: 31250 - DNA, 21 bp, synthetic construct
  source 1..21: mol_type = other DNA; mol_type = other DNA
aaaaatgattatttaatttac

SEQ ID NO: 31251 - DNA, 21 bp, synthetic construct
  source 1..21: mol_type = other DNA; mol_type = other DNA
tactggcagggcgttagggag

SEQ ID NO: 31252 - DNA, 21 bp, synthetic construct
  source 1..21: mol_type = other DNA; mol_type = other DNA
agaagggacggaacacctgcc

SEQ ID NO: 31253 - DNA, 21 bp, synthetic construct
  source 1..21: mol_type = other DNA; mol_type = other DNA
aacacgtcaaccaacggcata

SEQ ID NO: 31254 - DNA, 21 bp, synthetic construct
  source 1..21: mol_type = other DNA; mol_type = other DNA
tgcaagccaagcccgctcacc

SEQ ID NO: 31255 - DNA, 21 bp, synthetic construct
  source 1..21: mol_type = other DNA; mol_type = other DNA
tgtgttaaaacggacaggaat

SEQ ID NO: 31256 - DNA, 21 bp, synthetic construct
  source 1..21: mol_type = other DNA; mol_type = other DNA
tattggacgggtatgcctgac

SEQ ID NO: 31257 - DNA, 21 bp, synthetic construct
  source 1..21: mol_type = other DNA; mol_type = other DNA
gctactgagactggcccgaag

SEQ ID NO: 31258 - DNA, 21 bp, synthetic construct
  source 1..21: mol_type = other DNA; mol_type = other DNA
tatgccagaattggccagaac

SEQ ID NO: 31259 - DNA, 21 bp, synthetic construct
  source 1..21: mol_type = other DNA; mol_type = other DNA
cccatgggttcgaacacctgg

SEQ ID NO: 31260 - DNA, 21 bp, synthetic construct
  source 1..21: mol_type = other DNA; mol_type = other DNA
cgtaacgagtactctacgtac

SEQ ID NO: 31261 - DNA, 21 bp, synthetic construct
  source 1..21: mol_type = other DNA; mol_type = other DNA
tttagcaaaatctgtaaagag

SEQ ID NO: 31262 - DNA, 21 bp, synthetic construct
  source 1..21: mol_type = other DNA; mol_type = other DNA
tatcatcgtatgtcgccggat

SEQ ID NO: 31263 - DNA, 21 bp, synthetic construct
  source 1..21: mol_type = other DNA; mol_type = other DNA
tattcacgggcaaacattaat

SEQ ID NO: 31264 - DNA, 21 bp, synthetic construct
  source 1..21: mol_type = other DNA; mol_type = other DNA
cacaacagtacaaatggcatt

SEQ ID NO: 31265 - DNA, 21 bp, synthetic construct
  source 1..21: mol_type = other DNA; mol_type = other DNA
tgcaagccacagatgcccagt

SEQ ID NO: 31266 - DNA, 21 bp, synthetic construct
  source 1..21: mol_type = other DNA; mol_type = other DNA
tactcaaggatgaacttgaac

SEQ ID NO: 31267 - DNA, 21 bp, synthetic construct
  source 1..21: mol_type = other DNA; mol_type = other DNA
ttagcgaaaaatggggtaaat

SEQ ID NO: 31268 - DNA, 21 bp, synthetic construct
  source 1..21: mol_type = other DNA; mol_type = other DNA
tattttagtggcactataaga

SEQ ID NO: 31269 - DNA, 21 bp, synthetic construct
  source 1..21: mol_type = other DNA; mol_type = other DNA
tatcataggcaatctgacaat

SEQ ID NO: 31270 - DNA, 21 bp, synthetic construct
  source 1..21: mol_type = other DNA; mol_type = other DNA
tattctaggcaaggtcacaat

SEQ ID NO: 31271 - DNA, 21 bp, synthetic construct
  source 1..21: mol_type = other DNA; mol_type = other DNA
tgtaacaagccgatggcggcg

SEQ ID NO: 31272 - DNA, 21 bp, synthetic construct
  source 1..21: mol_type = other DNA; mol_type = other DNA
tacgctcgtcttggccaaaac

SEQ ID NO: 31273 - DNA, 21 bp, synthetic construct
  source 1..21: mol_type = other DNA; mol_type = other DNA
tgggtgcgtagcgatacgaag

SEQ ID NO: 31274 - DNA, 21 bp, synthetic construct
  source 1..21: mol_type = other DNA; mol_type = other DNA
tttgatagcacgaacggacgc

SEQ ID NO: 31275 - DNA, 21 bp, synthetic construct
  source 1..21: mol_type = other DNA; mol_type = other DNA
tacgcgaagggaaatgttaac

SEQ ID NO: 31276 - DNA, 21 bp, synthetic construct
  source 1..21: mol_type = other DNA; mol_type = other DNA
tttacaaggctcagcataaac

SEQ ID NO: 31277 - DNA, 21 bp, synthetic construct
  source 1..21: mol_type = other DNA; mol_type = other DNA
tattcacgagtcaacgacaat

SEQ ID NO: 31278 - DNA, 21 bp, synthetic construct
  source 1..21: mol_type = other DNA; mol_type = other DNA
tactgggctggcattccggac

SEQ ID NO: 31279 - DNA, 21 bp, synthetic construct
  source 1..21: mol_type = other DNA; mol_type = other DNA
tacgctcgtctcaaccacaac

SEQ ID NO: 31280 - DNA, 21 bp, synthetic construct
  source 1..21: mol_type = other DNA; mol_type = other DNA
tattggagcgccgttcaggaa

SEQ ID NO: 31281 - DNA, 21 bp, synthetic construct
  source 1..21: mol_type = other DNA; mol_type = other DNA
tattggcagggagtagtcgaa

SEQ ID NO: 31282 - DNA, 21 bp, synthetic construct
  source 1..21: mol_type = other DNA; mol_type = other DNA
tacagccgcacaaatgacaac

SEQ ID NO: 31283 - DNA, 21 bp, synthetic construct
  source 1..21: mol_type = other DNA; mol_type = other DNA
ggtagttcgactagccattgg

SEQ ID NO: 31284 - DNA, 21 bp, synthetic construct
  source 1..21: mol_type = other DNA; mol_type = other DNA
tggctcaaggagaagatgtgt

SEQ ID NO: 31285 - DNA, 21 bp, synthetic construct
  source 1..21: mol_type = other DNA; mol_type = other DNA
tattgtaaagacaaccgaccg

SEQ ID NO: 31286 - DNA, 21 bp, synthetic construct
  source 1..21: mol_type = other DNA; mol_type = other DNA
tattcgagaattaatgcaaac

SEQ ID NO: 31287 - DNA, 21 bp, synthetic construct
  source 1..21: mol_type = other DNA; mol_type = other DNA
aggacatatgatagcatcgcg

SEQ ID NO: 31288 - DNA, 21 bp, synthetic construct
  source 1..21: mol_type = other DNA; mol_type = other DNA
ggatgcggcacaatgtgtgga

SEQ ID NO: 31289 - DNA, 21 bp, synthetic construct
  source 1..21: mol_type = other DNA; mol_type = other DNA
atcaagtccactaatggtatc

SEQ ID NO: 31290 - DNA, 21 bp, synthetic construct
  source 1..21: mol_type = other DNA; mol_type = other DNA
tgcaggtcaggaccaacaccc

SEQ ID NO: 31291 - DNA, 21 bp, synthetic construct
  source 1..21: mol_type = other DNA; mol_type = other DNA
tgttctagaaacagtgataac

SEQ ID NO: 31292 - DNA, 21 bp, synthetic construct
  source 1..21: mol_type = other DNA; mol_type = other DNA
tattctcggatgaacactaat

SEQ ID NO: 31293 - DNA, 21 bp, synthetic construct
  source 1..21: mol_type = other DNA; mol_type = other DNA
tacagccgtgttaatttcaac

SEQ ID NO: 31294 - DNA, 21 bp, synthetic construct
  source 1..21: mol_type = other DNA; mol_type = other DNA
tacagccgtatgggcagtaac

SEQ ID NO: 31295 - DNA, 21 bp, synthetic construct
  source 1..21: mol_type = other DNA; mol_type = other DNA
cgtggagattacacaccgtgg

SEQ ID NO: 31296 - DNA, 21 bp, synthetic construct
  source 1..21: mol_type = other DNA; mol_type = other DNA
atcgataaattgtgtaagcct

SEQ ID NO: 31297 - DNA, 21 bp, synthetic construct
  source 1..21: mol_type = other DNA; mol_type = other DNA
tactttagcgcggtcagagag

SEQ ID NO: 31298 - DNA, 21 bp, synthetic construct
  source 1..21: mol_type = other DNA; mol_type = other DNA
ttttccagagccggaaacaat

SEQ ID NO: 31299 - DNA, 21 bp, synthetic construct
  source 1..21: mol_type = other DNA; mol_type = other DNA
tgccgagcccaaaccttagac

SEQ ID NO: 31300 - DNA, 21 bp, synthetic construct
  source 1..21: mol_type = other DNA; mol_type = other DNA
tacgaatcgacaaacggaatt

SEQ ID NO: 31301 - DNA, 21 bp, synthetic construct
  source 1..21: mol_type = other DNA; mol_type = other DNA
tgcaaaccagggcagcagtca

SEQ ID NO: 31302 - DNA, 21 bp, synthetic construct
  source 1..21: mol_type = other DNA; mol_type = other DNA
attttaagtagccaggcctgg

SEQ ID NO: 31303 - DNA, 21 bp, synthetic construct
  source 1..21: mol_type = other DNA; mol_type = other DNA
tactcctgcaatagtgacaac

SEQ ID NO: 31304 - DNA, 21 bp, synthetic construct
  source 1..21: mol_type = other DNA; mol_type = other DNA
ggcaagtcaggctgttgtagc

SEQ ID NO: 31305 - DNA, 21 bp, synthetic construct
  source 1..21: mol_type = other DNA; mol_type = other DNA
ggtggcatagggagtgcttgg

SEQ ID NO: 31306 - DNA, 21 bp, synthetic construct
  source 1..21: mol_type = other DNA; mol_type = other DNA
gatcaagagatcaagagacgc

SEQ ID NO: 31307 - DNA, 21 bp, synthetic construct
  source 1..21: mol_type = other DNA; mol_type = other DNA
ttatcaaaagcgggcaacaac

SEQ ID NO: 31308 - DNA, 21 bp, synthetic construct
  source 1..21: mol_type = other DNA; mol_type = other DNA
gtgtcgacgcacgactgtgct

SEQ ID NO: 31309 - DNA, 21 bp, synthetic construct
  source 1..21: mol_type = other DNA; mol_type = other DNA
atcatgcaagatagaagttgg

SEQ ID NO: 31310 - DNA, 21 bp, synthetic construct
  source 1..21: mol_type = other DNA; mol_type = other DNA
tattcgagggcgtcagacaat

SEQ ID NO: 31311 - DNA, 21 bp, synthetic construct
  source 1..21: mol_type = other DNA; mol_type = other DNA
tatagtagggccaatgccaac

SEQ ID NO: 31312 - DNA, 21 bp, synthetic construct
  source 1..21: mol_type = other DNA; mol_type = other DNA
tgccgcatggactcggtgccg

SEQ ID NO: 31313 - DNA, 21 bp, synthetic construct
  source 1..21: mol_type = other DNA; mol_type = other DNA
attatgagttcgcgttcctgg

SEQ ID NO: 31314 - DNA, 21 bp, synthetic construct
  source 1..21: mol_type = other DNA; mol_type = other DNA
tgcgccaaatcagcgcgggag

SEQ ID NO: 31315 - DNA, 21 bp, synthetic construct
  source 1..21: mol_type = other DNA; mol_type = other DNA
tatttccacggaacagttgac

SEQ ID NO: 31316 - DNA, 21 bp, synthetic construct
  source 1..21: mol_type = other DNA; mol_type = other DNA
tacctaaagagtaatccctac

SEQ ID NO: 31317 - DNA, 21 bp, synthetic construct
  source 1..21: mol_type = other DNA; mol_type = other DNA
atgactggcactagttgcatg

SEQ ID NO: 31318 - DNA, 21 bp, synthetic construct
  source 1..21: mol_type = other DNA; mol_type = other DNA
tgcaaaccacagcacggtgga

SEQ ID NO: 31319 - DNA, 21 bp, synthetic construct
  source 1..21: mol_type = other DNA; mol_type = other DNA
tacgagcggggatgcaaagag

SEQ ID NO: 31320 - DNA, 21 bp, synthetic construct
  source 1..21: mol_type = other DNA; mol_type = other DNA
agcattagcacgaatggagtg

SEQ ID NO: 31321 - DNA, 21 bp, synthetic construct
  source 1..21: mol_type = other DNA; mol_type = other DNA
ggaggagaatacgtctcgtat

SEQ ID NO: 31322 - DNA, 21 bp, synthetic construct
  source 1..21: mol_type = other DNA; mol_type = other DNA
tatgctcggaacgggcagaat

SEQ ID NO: 31323 - DNA, 21 bp, synthetic construct
  source 1..21: mol_type = other DNA; mol_type = other DNA
tatttctcgggtacacaccaa

SEQ ID NO: 31324 - DNA, 21 bp, synthetic construct
  source 1..21: mol_type = other DNA; mol_type = other DNA
tactatacaggttttgtcgac

SEQ ID NO: 31325 - DNA, 21 bp, synthetic construct
  source 1..21: mol_type = other DNA; mol_type = other DNA
tacgctcgtggcggtaataac

SEQ ID NO: 31326 - DNA, 21 bp, synthetic construct
  source 1..21: mol_type = other DNA; mol_type = other DNA
aaagatgagtggagaccgttc

SEQ ID NO: 31327 - DNA, 21 bp, synthetic construct
  source 1..21: mol_type = other DNA; mol_type = other DNA
tgtaagccgttgcaaccggcg

SEQ ID NO: 31328 - DNA, 21 bp, synthetic construct
  source 1..21: mol_type = other DNA; mol_type = other DNA
tggtttactggacgcatcgac

SEQ ID NO: 31329 - DNA, 21 bp, synthetic construct
  source 1..21: mol_type = other DNA; mol_type = other DNA
tacagcaggatgaatgacaac

SEQ ID NO: 31330 - DNA, 21 bp, synthetic construct
  source 1..21: mol_type = other DNA; mol_type = other DNA
aaggatgatttcgtcgtctgg

SEQ ID NO: 31331 - DNA, 21 bp, synthetic construct
  source 1..21: mol_type = other DNA; mol_type = other DNA
tatgccaaattaggttataat

SEQ ID NO: 31332 - DNA, 21 bp, synthetic construct
  source 1..21: mol_type = other DNA; mol_type = other DNA
tactcaagagctaatgctaat

SEQ ID NO: 31333 - DNA, 21 bp, synthetic construct
  source 1..21: mol_type = other DNA; mol_type = other DNA
ttttggacgggcgtcaaggat

SEQ ID NO: 31334 - DNA, 21 bp, synthetic construct
  source 1..21: mol_type = other DNA; mol_type = other DNA
ggctgcaaacctttgtgtgtt

SEQ ID NO: 31335 - DNA, 21 bp, synthetic construct
  source 1..21: mol_type = other DNA; mol_type = other DNA
aagtacgaccacgttacttgg

SEQ ID NO: 31336 - DNA, 21 bp, synthetic construct
  source 1..21: mol_type = other DNA; mol_type = other DNA
ttcttctccggggtacaggcc

SEQ ID NO: 31337 - DNA, 21 bp, synthetic construct
  source 1..21: mol_type = other DNA; mol_type = other DNA
tacagccgtctatctgattat

SEQ ID NO: 31338 - DNA, 21 bp, synthetic construct
  source 1..21: mol_type = other DNA; mol_type = other DNA
ttctccaagattggtttcaat

SEQ ID NO: 31339 - DNA, 21 bp, synthetic construct
  source 1..21: mol_type = other DNA; mol_type = other DNA
tatttcacaggcatgcaggaa

SEQ ID NO: 31340 - DNA, 21 bp, synthetic construct
  source 1..21: mol_type = other DNA; mol_type = other DNA
ttgagcgactttaagatctat

SEQ ID NO: 31341 - DNA, 21 bp, synthetic construct
  source 1..21: mol_type = other DNA; mol_type = other DNA
tgcgccccatatttacacgag

SEQ ID NO: 31342 - DNA, 21 bp, synthetic construct
  source 1..21: mol_type = other DNA; mol_type = other DNA
ttggccaggacgggtaatgac

SEQ ID NO: 31343 - DNA, 21 bp, synthetic construct
  source 1..21: mol_type = other DNA; mol_type = other DNA
tattcgaaacagaactggaac

SEQ ID NO: 31344 - DNA, 21 bp, synthetic construct
  source 1..21: mol_type = other DNA; mol_type = other DNA
tacttttccggtgttccaacg

SEQ ID NO: 31345 - DNA, 21 bp, synthetic construct
  source 1..21: mol_type = other DNA; mol_type = other DNA
tactttgctggcagaacgagt

SEQ ID NO: 31346 - DNA, 21 bp, synthetic construct
  source 1..21: mol_type = other DNA; mol_type = other DNA
tattacactggcgtccaggca

SEQ ID NO: 31347 - DNA, 21 bp, synthetic construct
  source 1..21: mol_type = other DNA; mol_type = other DNA
tgcaataaagatatgactgcg

SEQ ID NO: 31348 - DNA, 21 bp, synthetic construct
  source 1..21: mol_type = other DNA; mol_type = other DNA
tgcatgaaacctaggctcgaa

SEQ ID NO: 31349 - DNA, 21 bp, synthetic construct
  source 1..21: mol_type = other DNA; mol_type = other DNA
gggtgccgtcatggcgatgtt

SEQ ID NO: 31350 - DNA, 21 bp, synthetic construct
  source 1..21: mol_type = other DNA; mol_type = other DNA
tatgcccgtggtaatgttaac

SEQ ID NO: 31351 - DNA, 21 bp, synthetic construct
  source 1..21: mol_type = other DNA; mol_type = other DNA
tatgttcgttcacagccatta

SEQ ID NO: 31352 - DNA, 21 bp, synthetic construct
  source 1..21: mol_type = other DNA; mol_type = other DNA
tatagccgtacgggtggaaat

SEQ ID NO: 31353 - DNA, 21 bp, synthetic construct
  source 1..21: mol_type = other DNA; mol_type = other DNA
tggtggagtggaacggcggct

SEQ ID NO: 31354 - DNA, 21 bp, synthetic construct
  source 1..21: mol_type = other DNA; mol_type = other DNA
gagatgggaagcgcaacctgg

SEQ ID NO: 31355 - DNA, 21 bp, synthetic construct
  source 1..21: mol_type = other DNA; mol_type = other DNA
tggactccggcatgtaaagcc

SEQ ID NO: 31356 - DNA, 21 bp, synthetic construct
  source 1..21: mol_type = other DNA; mol_type = other DNA
atggaatcaacgaacggtgta

SEQ ID NO: 31357 - DNA, 21 bp, synthetic construct
  source 1..21: mol_type = other DNA; mol_type = other DNA
tacgccaggcaaggggctaat

SEQ ID NO: 31358 - DNA, 21 bp, synthetic construct
  source 1..21: mol_type = other DNA; mol_type = other DNA
tatgtcagaagccagccgcat

SEQ ID NO: 31359 - DNA, 21 bp, synthetic construct
  source 1..21: mol_type = other DNA; mol_type = other DNA
cgcacatacgaggtataccca

SEQ ID NO: 31360 - DNA, 21 bp, synthetic construct
  source 1..21: mol_type = other DNA; mol_type = other DNA
cgcgatcagtatagtacttac

SEQ ID NO: 31361 - DNA, 21 bp, synthetic construct
  source 1..21: mol_type = other DNA; mol_type = other DNA
tttttcagtggtcagcgggaa

SEQ ID NO: 31362 - DNA, 21 bp, synthetic construct
  source 1..21: mol_type = other DNA; mol_type = other DNA
ggtgatgattttgtgaggtgg

SEQ ID NO: 31363 - DNA, 21 bp, synthetic construct
  source 1..21: mol_type = other DNA; mol_type = other DNA
tatttcaccggcacgttacaa

SEQ ID NO: 31364 - DNA, 21 bp, synthetic construct
  source 1..21: mol_type = other DNA; mol_type = other DNA
tatagtcggctgaacaataac

SEQ ID NO: 31365 - DNA, 21 bp, synthetic construct
  source 1..21: mol_type = other DNA; mol_type = other DNA
tactatagcggtcggattgac

SEQ ID NO: 31366 - DNA, 21 bp, synthetic construct
  source 1..21: mol_type = other DNA; mol_type = other DNA
tactactcgggcgtaatagcc

SEQ ID NO: 31367 - DNA, 21 bp, synthetic construct
  source 1..21: mol_type = other DNA; mol_type = other DNA
tgtgcaccttttttacacgaa

SEQ ID NO: 31368 - DNA, 21 bp, synthetic construct
  source 1..21: mol_type = other DNA; mol_type = other DNA
tacagtcgaagcaatgataac

SEQ ID NO: 31369 - DNA, 21 bp, synthetic construct
  source 1..21: mol_type = other DNA; mol_type = other DNA
gtgcatgattacatgtcctat

SEQ ID NO: 31370 - DNA, 21 bp, synthetic construct
  source 1..21: mol_type = other DNA; mol_type = other DNA
aacgccctgggctgtgcgggt

SEQ ID NO: 31371 - DNA, 21 bp, synthetic construct
  source 1..21: mol_type = other DNA; mol_type = other DNA
tacgtcagaagcggatgtggg

SEQ ID NO: 31372 - DNA, 21 bp, synthetic construct
  source 1..21: mol_type = other DNA; mol_type = other DNA
taccatagactcagtcgcgat

SEQ ID NO: 31373 - DNA, 21 bp, synthetic construct
  source 1..21: mol_type = other DNA; mol_type = other DNA
tatgtaagatatgacactggg

SEQ ID NO: 31374 - DNA, 21 bp, synthetic construct
  source 1..21: mol_type = other DNA; mol_type = other DNA
ctcaggggcgacgattgcgca

SEQ ID NO: 31375 - DNA, 21 bp, synthetic construct
  source 1..21: mol_type = other DNA; mol_type = other DNA
ttagccaggtcagggtgggac

SEQ ID NO: 31376 - DNA, 21 bp, synthetic construct
  source 1..21: mol_type = other DNA; mol_type = other DNA
tttagcagcaccaacggtatt

SEQ ID NO: 31377 - DNA, 21 bp, synthetic construct
  source 1..21: mol_type = other DNA; mol_type = other DNA
tatgctcgtgggaatcccaat

SEQ ID NO: 31378 - DNA, 21 bp, synthetic construct
  source 1..21: mol_type = other DNA; mol_type = other DNA
gaaccccaaagccgtcattgg

SEQ ID NO: 31379 - DNA, 21 bp, synthetic construct
  source 1..21: mol_type = other DNA; mol_type = other DNA
ggttgcggtacgaaagctgga

SEQ ID NO: 31380 - DNA, 21 bp, synthetic construct
  source 1..21: mol_type = other DNA; mol_type = other DNA
cgcatggagagcgcggactgg

SEQ ID NO: 31381 - DNA, 21 bp, synthetic construct
  source 1..21: mol_type = other DNA; mol_type = other DNA
tattggtctcaaatcaaagac

SEQ ID NO: 31382 - DNA, 21 bp, synthetic construct
  source 1..21: mol_type = other DNA; mol_type = other DNA
ctgcagtcaaccaatggtgta

SEQ ID NO: 31383 - DNA, 21 bp, synthetic construct
  source 1..21: mol_type = other DNA; mol_type = other DNA
cttagtagacagaacttcaac

SEQ ID NO: 31384 - DNA, 21 bp, synthetic construct
  source 1..21: mol_type = other DNA; mol_type = other DNA
ttctacgaaggcaaaccgtgt

SEQ ID NO: 31385 - DNA, 21 bp, synthetic construct
  source 1..21: mol_type = other DNA; mol_type = other DNA
tgcaataaacctatgaccgta

SEQ ID NO: 31386 - DNA, 21 bp, synthetic construct
  source 1..21: mol_type = other DNA; mol_type = other DNA
tacagtcgcgctggaaacaac

SEQ ID NO: 31387 - DNA, 21 bp, synthetic construct
  source 1..21: mol_type = other DNA; mol_type = other DNA
tatagcaaatggaatacaaac

SEQ ID NO: 31388 - DNA, 21 bp, synthetic construct
  source 1..21: mol_type = other DNA; mol_type = other DNA
ttctcccgggcgggtattaac

SEQ ID NO: 31389 - DNA, 21 bp, synthetic construct
  source 1..21: mol_type = other DNA; mol_type = other DNA
tatgctcggatgggttataat

SEQ ID NO: 31390 - DNA, 21 bp, synthetic construct
  source 1..21: mol_type = other DNA; mol_type = other DNA
cgggaacaagaagtaagatgg

SEQ ID NO: 31391 - DNA, 21 bp, synthetic construct
  source 1..21: mol_type = other DNA; mol_type = other DNA
ggtgtagaagcggttcgatgg

SEQ ID NO: 31392 - DNA, 21 bp, synthetic construct
  source 1..21: mol_type = other DNA; mol_type = other DNA
tacacccgtttagatgtctta

SEQ ID NO: 31393 - DNA, 21 bp, synthetic construct
  source 1..21: mol_type = other DNA; mol_type = other DNA
tattttacaggttcggtcgac

SEQ ID NO: 31394 - DNA, 21 bp, synthetic construct
  source 1..21: mol_type = other DNA; mol_type = other DNA
tgcaagggatctaaagagcaa

SEQ ID NO: 31395 - DNA, 21 bp, synthetic construct
  source 1..21: mol_type = other DNA; mol_type = other DNA
cggctccccgacgtatatcct

SEQ ID NO: 31396 - DNA, 21 bp, synthetic construct
  source 1..21: mol_type = other DNA; mol_type = other DNA
tattacaccggagtaaagggt

SEQ ID NO: 31397 - DNA, 21 bp, synthetic construct
  source 1..21: mol_type = other DNA; mol_type = other DNA
cacatgcctgaccgcaagtgg

SEQ ID NO: 31398 - DNA, 21 bp, synthetic construct
  source 1..21: mol_type = other DNA; mol_type = other DNA
attaacggaggcaagtgtgac

SEQ ID NO: 31399 - DNA, 21 bp, synthetic construct
  source 1..21: mol_type = other DNA; mol_type = other DNA
tattatactggtaagtgcgat

SEQ ID NO: 31400 - DNA, 21 bp, synthetic construct
  source 1..21: mol_type = other DNA; mol_type = other DNA
tatttcagtgggaccgtgtat

SEQ ID NO: 31401 - DNA, 21 bp, synthetic construct
  source 1..21: mol_type = other DNA; mol_type = other DNA
cgccgtgatggtacccccgca

SEQ ID NO: 31402 - DNA, 21 bp, synthetic construct
  source 1..21: mol_type = other DNA; mol_type = other DNA
gttatggcggacagggcctgg

SEQ ID NO: 31403 - DNA, 21 bp, synthetic construct
  source 1..21: mol_type = other DNA; mol_type = other DNA
tatagtcgttcaggaatcaat

SEQ ID NO: 31404 - DNA, 21 bp, synthetic construct
  source 1..21: mol_type = other DNA; mol_type = other DNA
ctctggagaaccgagcccgat

SEQ ID NO: 31405 - DNA, 21 bp, synthetic construct
  source 1..21: mol_type = other DNA; mol_type = other DNA
cgcgagggggcaagctactgg

SEQ ID NO: 31406 - DNA, 21 bp, synthetic construct
  source 1..21: mol_type = other DNA; mol_type = other DNA
tatagccgcgcgggacagaat

SEQ ID NO: 31407 - DNA, 21 bp, synthetic construct
  source 1..21: mol_type = other DNA; mol_type = other DNA
cgggaagagagtagtagatgg

SEQ ID NO: 31408 - DNA, 21 bp, synthetic construct
  source 1..21: mol_type = other DNA; mol_type = other DNA
tatgcgcggctaaacattaat

SEQ ID NO: 31409 - DNA, 21 bp, synthetic construct
  source 1..21: mol_type = other DNA; mol_type = other DNA
tgcggctcatggcagagggaa

SEQ ID NO: 31410 - DNA, 21 bp, synthetic construct
  source 1..21: mol_type = other DNA; mol_type = other DNA
tatttttcaggcctccatgcc

SEQ ID NO: 31411 - DNA, 21 bp, synthetic construct
  source 1..21: mol_type = other DNA; mol_type = other DNA
aaggacggatacagtgcatat

SEQ ID NO: 31412 - DNA, 21 bp, synthetic construct
  source 1..21: mol_type = other DNA; mol_type = other DNA
tgccgcggcgataacggggtg

SEQ ID NO: 31413 - DNA, 21 bp, synthetic construct
  source 1..21: mol_type = other DNA; mol_type = other DNA
tatagccgaatgaatataaat

SEQ ID NO: 31414 - DNA, 21 bp, synthetic construct
  source 1..21: mol_type = other DNA; mol_type = other DNA
cgcaccccgacttgtccacca

SEQ ID NO: 31415 - DNA, 21 bp, synthetic construct
  source 1..21: mol_type = other DNA; mol_type = other DNA
tatgcacgtcagaacattaac

SEQ ID NO: 31416 - DNA, 21 bp, synthetic construct
  source 1..21: mol_type = other DNA; mol_type = other DNA
tacagccgtataaactacaac

SEQ ID NO: 31417 - DNA, 21 bp, synthetic construct
  source 1..21: mol_type = other DNA; mol_type = other DNA
cgcgactcctattctacatac

SEQ ID NO: 31418 - DNA, 21 bp, synthetic construct
  source 1..21: mol_type = other DNA; mol_type = other DNA
atgaccggaactagctgctgg

SEQ ID NO: 31419 - DNA, 21 bp, synthetic construct
  source 1..21: mol_type = other DNA; mol_type = other DNA
gatgcattccgtggatttgat

SEQ ID NO: 31420 - DNA, 21 bp, synthetic construct
  source 1..21: mol_type = other DNA; mol_type = other DNA
tcggctaatacgggaaggtgc

SEQ ID NO: 31421 - DNA, 21 bp, synthetic construct
  source 1..21: mol_type = other DNA; mol_type = other DNA
tattcacgcatgggcgccaat

SEQ ID NO: 31422 - DNA, 21 bp, synthetic construct
  source 1..21: mol_type = other DNA; mol_type = other DNA
ggatgcgtggttaagcctgag

SEQ ID NO: 31423 - DNA, 21 bp, synthetic construct
  source 1..21: mol_type = other DNA; mol_type = other DNA
ttaaaggacggcactaacgct

SEQ ID NO: 31424 - DNA, 21 bp, synthetic construct
  source 1..21: mol_type = other DNA; mol_type = other DNA
tactacaccggccatcttgat

SEQ ID NO: 31425 - DNA, 21 bp, synthetic construct
  source 1..21: mol_type = other DNA; mol_type = other DNA
tatttcagcgggcaaagcgcg

SEQ ID NO: 31426 - DNA, 21 bp, synthetic construct
  source 1..21: mol_type = other DNA; mol_type = other DNA
tacttcgccggcgtgatgaat

SEQ ID NO: 31427 - DNA, 21 bp, synthetic construct
  source 1..21: mol_type = other DNA; mol_type = other DNA
tgtagagaaggtactcgggcc

SEQ ID NO: 31428 - DNA, 21 bp, synthetic construct
  source 1..21: mol_type = other DNA; mol_type = other DNA
agggaaccgggctgcaaggaa

SEQ ID NO: 31429 - DNA, 21 bp, synthetic construct
  source 1..21: mol_type = other DNA; mol_type = other DNA
gcgcctgagacgatccgttgg

SEQ ID NO: 31430 - DNA, 21 bp, synthetic construct
  source 1..21: mol_type = other DNA; mol_type = other DNA
ctttcatccacgaacggtatc

SEQ ID NO: 31431 - DNA, 21 bp, synthetic construct
  source 1..21: mol_type = other DNA; mol_type = other DNA
tactcccgcagtaatatcaac

SEQ ID NO: 31432 - DNA, 21 bp, synthetic construct
  source 1..21: mol_type = other DNA; mol_type = other DNA
tttatgtctactaatggagtc

SEQ ID NO: 31433 - DNA, 21 bp, synthetic construct
  source 1..21: mol_type = other DNA; mol_type = other DNA
ggaagtataggggtagcgtgg

SEQ ID NO: 31434 - DNA, 21 bp, synthetic construct
  source 1..21: mol_type = other DNA; mol_type = other DNA
tttttcagtgggcagatagaa

SEQ ID NO: 31435 - DNA, 21 bp, synthetic construct
  source 1..21: mol_type = other DNA; mol_type = other DNA
agggaggatcatacttactgg

SEQ ID NO: 31436 - DNA, 21 bp, synthetic construct
  source 1..21: mol_type = other DNA; mol_type = other DNA
tatagccggatgaatatgaat

SEQ ID NO: 31437 - DNA, 21 bp, synthetic construct
  source 1..21: mol_type = other DNA; mol_type = other DNA
tactttcccggctgcaaggag

SEQ ID NO: 31438 - DNA, 21 bp, synthetic construct
  source 1..21: mol_type = other DNA; mol_type = other DNA
tgtgggggtggcaaaccaccg

SEQ ID NO: 31439 - DNA, 21 bp, synthetic construct
  source 1..21: mol_type = other DNA; mol_type = other DNA
aacgctcttgaaggcaaagat

SEQ ID NO: 31440 - DNA, 21 bp, synthetic construct
  source 1..21: mol_type = other DNA; mol_type = other DNA
aggacgtatgatacatatccg

SEQ ID NO: 31441 - DNA, 21 bp, synthetic construct
  source 1..21: mol_type = other DNA; mol_type = other DNA
tatttttccggtaggcatgac

SEQ ID NO: 31442 - DNA, 21 bp, synthetic construct
  source 1..21: mol_type = other DNA; mol_type = other DNA
tattctcgagcgaactataac

SEQ ID NO: 31443 - DNA, 21 bp, synthetic construct
  source 1..21: mol_type = other DNA; mol_type = other DNA
atgtttgatggtacggaagcg

SEQ ID NO: 31444 - DNA, 21 bp, synthetic construct
  source 1..21: mol_type = other DNA; mol_type = other DNA
tacccctttccaacggaggct

SEQ ID NO: 31445 - DNA, 21 bp, synthetic construct
  source 1..21: mol_type = other DNA; mol_type = other DNA
gcgatgttgtcctcgacctgg

SEQ ID NO: 31446 - DNA, 21 bp, synthetic construct
  source 1..21: mol_type = other DNA; mol_type = other DNA
actgatgagacggtgtactca

SEQ ID NO: 31447 - DNA, 21 bp, synthetic construct
  source 1..21: mol_type = other DNA; mol_type = other DNA
tactcaaaaatgggtgacaac

SEQ ID NO: 31448 - DNA, 21 bp, synthetic construct
  source 1..21: mol_type = other DNA; mol_type = other DNA
ggctgtagacatggtggtatc

SEQ ID NO: 31449 - DNA, 21 bp, synthetic construct
  source 1..21: mol_type = other DNA; mol_type = other DNA
tattggactaagatacccgaa

SEQ ID NO: 31450 - DNA, 21 bp, synthetic construct
  source 1..21: mol_type = other DNA; mol_type = other DNA
cgggatgaatttgtaatgttt

SEQ ID NO: 31451 - DNA, 21 bp, synthetic construct
  source 1..21: mol_type = other DNA; mol_type = other DNA
tacagccgtgttaatgttaac

SEQ ID NO: 31452 - DNA, 21 bp, synthetic construct
  source 1..21: mol_type = other DNA; mol_type = other DNA
tacagcgctcgaaatgataac

SEQ ID NO: 31453 - DNA, 21 bp, synthetic construct
  source 1..21: mol_type = other DNA; mol_type = other DNA
tttgaaagcacgaacggcatt

SEQ ID NO: 31454 - DNA, 21 bp, synthetic construct
  source 1..21: mol_type = other DNA; mol_type = other DNA
tattggagtggtctcctcgac

SEQ ID NO: 31455 - DNA, 21 bp, synthetic construct
  source 1..21: mol_type = other DNA; mol_type = other DNA
agaaacgagtatacgacgtat

SEQ ID NO: 31456 - DNA, 21 bp, synthetic construct
  source 1..21: mol_type = other DNA; mol_type = other DNA
tggttttcggggaagattgac

SEQ ID NO: 31457 - DNA, 21 bp, synthetic construct
  source 1..21: mol_type = other DNA; mol_type = other DNA
aaatgggatagtgccacctgg

SEQ ID NO: 31458 - DNA, 21 bp, synthetic construct
  source 1..21: mol_type = other DNA; mol_type = other DNA
atgttcgacgggactgaggct

SEQ ID NO: 31459 - DNA, 21 bp, synthetic construct
  source 1..21: mol_type = other DNA; mol_type = other DNA
aaacttgagtcagtggtgtgg

SEQ ID NO: 31460 - DNA, 21 bp, synthetic construct
  source 1..21: mol_type = other DNA; mol_type = other DNA
tattcgaggaaaggtgagaat

SEQ ID NO: 31461 - DNA, 21 bp, synthetic construct
  source 1..21: mol_type = other DNA; mol_type = other DNA
tacttcacgaaaaactgtgag

SEQ ID NO: 31462 - DNA, 21 bp, synthetic construct
  source 1..21: mol_type = other DNA; mol_type = other DNA
tactggacaggcacgcttgag

SEQ ID NO: 31463 - DNA, 21 bp, synthetic construct
  source 1..21: mol_type = other DNA; mol_type = other DNA
tgcaaaccaccaatgcctcct

SEQ ID NO: 31464 - DNA, 21 bp, synthetic construct
  source 1..21: mol_type = other DNA; mol_type = other DNA
tgtagaccgggaactcctggc

SEQ ID NO: 31465 - DNA, 21 bp, synthetic construct
  source 1..21: mol_type = other DNA; mol_type = other DNA
gtaatgcttgatagggggtgg

SEQ ID NO: 31466 - DNA, 21 bp, synthetic construct
  source 1..21: mol_type = other DNA; mol_type = other DNA
tttagtcgaactggtttgaat

SEQ ID NO: 31467 - DNA, 21 bp, synthetic construct
  source 1..21: mol_type = other DNA
atgtgggatggaacgattgca

SEQ ID NO: 31468 - DNA, 21 bp, synthetic construct
  source 1..21: mol_type = other DNA
tgcaccagtgatacagggcat

SEQ ID NO: 31469 - DNA, 21 bp, synthetic construct
  source 1..21: mol_type = other DNA
cccttagccgataggatgtgg

SEQ ID NO: 31470 - DNA, 21 bp, synthetic construct
  source 1..21: mol_type = other DNA
tatttcgcggggcaagtagct

SEQ ID NO: 31471 - DNA, 21 bp, synthetic construct
  source 1..21: mol_type = other DNA
tacgttcgctcaaatgcgaat

SEQ ID NO: 31472 - DNA, 21 bp, synthetic construct
  source 1..21: mol_type = other DNA
ggggccgacggtgtccggtgg

SEQ ID NO: 31473 - DNA, 21 bp, synthetic construct
  source 1..21: mol_type = other DNA
tactttaaaggtaaatgcgaa

SEQ ID NO: 31474 - DNA, 21 bp, synthetic construct
  source 1..21: mol_type = other DNA
tacttttcgggaatgaccgaa

SEQ ID NO: 31475 - DNA, 21 bp, synthetic construct
  source 1..21: mol_type = other DNA
tatttgaaatcaaacccatat

SEQ ID NO: 31476 - DNA, 21 bp, synthetic construct
  source 1..21: mol_type = other DNA
gaccgggggggatgcccgagg

SEQ ID NO: 31477 - DNA, 21 bp, synthetic construct
  source 1..21: mol_type = other DNA
tacgcccgtgggggccacaat

SEQ ID NO: 31478 - DNA, 21 bp, synthetic construct
  source 1..21: mol_type = other DNA
aagtatgagtcctcggtatgg

SEQ ID NO: 31479 - DNA, 21 bp, synthetic construct
  source 1..21: mol_type = other DNA
atcatgcaagatagggcctgg

SEQ ID NO: 31480 - DNA, 21 bp, synthetic construct
  source 1..21: mol_type = other DNA
tacgcgagacagtctaataac

SEQ ID NO: 31481 - DNA, 21 bp, synthetic construct
  source 1..21: mol_type = other DNA
ataccatcgtccagcctttgg

SEQ ID NO: 31482 - DNA, 21 bp, synthetic construct
  source 1..21: mol_type = other DNA
gggggctcaacatctacgtgg

SEQ ID NO: 31483 - DNA, 21 bp, synthetic construct
  source 1..21: mol_type = other DNA
tgtaagccacagggcggaaca

SEQ ID NO: 31484 - DNA, 21 bp, synthetic construct
  source 1..21: mol_type = other DNA
tattggtccggtatgcctgaa

SEQ ID NO: 31485 - DNA, 21 bp, synthetic construct
  source 1..21: mol_type = other DNA; mol_type = other DNA
gatttgagttccggcaactgg

SEQ ID NO: 31486 - DNA, 21 bp, synthetic construct
  source 1..21: mol_type = other DNA; mol_type = other DNA
cgggagggtaccagttactgg

SEQ ID NO: 31487 - DNA, 21 bp, synthetic construct
  source 1..21: mol_type = other DNA; mol_type = other DNA
tgcaaaccacccatgggggct

SEQ ID NO: 31488 - DNA, 21 bp, synthetic construct
  source 1..21: mol_type = other DNA; mol_type = other DNA
tgcggggggggtaagacacca

SEQ ID NO: 31489 - DNA, 21 bp, synthetic construct
  source 1..21: mol_type = other DNA; mol_type = other DNA
tcggacggcgtaagtaaatgg

SEQ ID NO: 31490 - DNA, 21 bp, synthetic construct
  source 1..21: mol_type = other DNA; mol_type = other DNA
tgcaaacctcagacaataggg

SEQ ID NO: 31491 - DNA, 21 bp, synthetic construct
  source 1..21: mol_type = other DNA; mol_type = other DNA
ttcatcaaacatgacacgaag

SEQ ID NO: 31492 - DNA, 21 bp, synthetic construct
  source 1..21: mol_type = other DNA; mol_type = other DNA
tgcaataaaccatatacggcg

SEQ ID NO: 31493 - DNA, 21 bp, synthetic construct
  source 1..21: mol_type = other DNA; mol_type = other DNA
tgcaaaggactaccacccccg

SEQ ID NO: 31494 - DNA, 21 bp, synthetic construct
  source 1..21: mol_type = other DNA; mol_type = other DNA
tatagccgcagcaacgagaat

SEQ ID NO: 31495 - DNA, 21 bp, synthetic construct
  source 1..21: mol_type = other DNA; mol_type = other DNA
tactcaagattgagtggaaac

SEQ ID NO: 31496 - DNA, 21 bp, synthetic construct
  source 1..21: mol_type = other DNA; mol_type = other DNA
tgcatggaaaggaagccagaa

SEQ ID NO: 31497 - DNA, 21 bp, synthetic construct
  source 1..21: mol_type = other DNA; mol_type = other DNA
tggatgaaaggcgcctgcgcc

SEQ ID NO: 31498 - DNA, 21 bp, synthetic construct
  source 1..21: mol_type = other DNA; mol_type = other DNA
tattggagtggtatgaatgcc

SEQ ID NO: 31499 - DNA, 21 bp, synthetic construct
  source 1..21: mol_type = other DNA; mol_type = other DNA
actgacggcacatcgttgtgg

SEQ ID NO: 31500 - DNA, 21 bp, synthetic construct
  source 1..21: mol_type = other DNA; mol_type = other DNA
tatgtccgctcgcaacagagt

SEQ ID NO: 31501 - DNA, 21 bp, synthetic construct
  source 1..21: mol_type = other DNA; mol_type = other DNA
gtcgacgaattcctgtcatgg

SEQ ID NO: 31502 - DNA, 21 bp, synthetic construct
  source 1..21: mol_type = other DNA; mol_type = other DNA
tatagcagaatgggtgcaaac

SEQ ID NO: 31503 - DNA, 21 bp, synthetic construct
  source 1..21: mol_type = other DNA; mol_type = other DNA
tactcacggatgaatgctaat

SEQ ID NO: 31504 - DNA, 21 bp, synthetic construct
  source 1..21: mol_type = other DNA; mol_type = other DNA
cgcgacgcctttaccgtatat

SEQ ID NO: 31505 - DNA, 21 bp, synthetic construct
  source 1..21: mol_type = other DNA; mol_type = other DNA
ttttccagagcgggttctaac

SEQ ID NO: 31506 - DNA, 21 bp, synthetic construct
  source 1..21: mol_type = other DNA; mol_type = other DNA
tatgagatggggtgtaaagaa

SEQ ID NO: 31507 - DNA, 21 bp, synthetic construct
  source 1..21: mol_type = other DNA; mol_type = other DNA
tcgatgcaggaccgtggctgg

SEQ ID NO: 31508 - DNA, 21 bp, synthetic construct
  source 1..21: mol_type = other DNA; mol_type = other DNA
tatgatagtaccaacgggatc

SEQ ID NO: 31509 - DNA, 21 bp, synthetic construct
  source 1..21: mol_type = other DNA; mol_type = other DNA
aagaacgatagtgccacttgt

SEQ ID NO: 31510 - DNA, 21 bp, synthetic construct
  source 1..21: mol_type = other DNA; mol_type = other DNA
tgtgcaaaggttggcgtacca

SEQ ID NO: 31511 - DNA, 21 bp, synthetic construct
  source 1..21: mol_type = other DNA; mol_type = other DNA
atgactgggacatcatgtatt

SEQ ID NO: 31512 - DNA, 21 bp, synthetic construct
  source 1..21: mol_type = other DNA; mol_type = other DNA
cgtagtcccgatgcctaccca

SEQ ID NO: 31513 - DNA, 21 bp, synthetic construct
  source 1..21: mol_type = other DNA; mol_type = other DNA
gtaggaatgagatgtccccca

SEQ ID NO: 31514 - DNA, 21 bp, synthetic construct
  source 1..21: mol_type = other DNA; mol_type = other DNA
agaagcgaattcctaccatat

SEQ ID NO: 31515 - DNA, 21 bp, synthetic construct
  source 1..21: mol_type = other DNA; mol_type = other DNA
tgcatgaagaagagtgagaca

SEQ ID NO: 31516 - DNA, 21 bp, synthetic construct
  source 1..21: mol_type = other DNA; mol_type = other DNA
tactcgaagcacggcttcaac

SEQ ID NO: 31517 - DNA, 21 bp, synthetic construct
  source 1..21: mol_type = other DNA; mol_type = other DNA
tatgctaagggcggccttaat

SEQ ID NO: 31518 - DNA, 21 bp, synthetic construct
  source 1..21: mol_type = other DNA; mol_type = other DNA
atgtttgatgggacacgggca

SEQ ID NO: 31519 - DNA, 21 bp, synthetic construct
  source 1..21: mol_type = other DNA; mol_type = other DNA
attcctcatcgaagctgcgct

SEQ ID NO: 31520 - DNA, 21 bp, synthetic construct
  source 1..21: mol_type = other DNA; mol_type = other DNA
tatagtcggcagggtatgaat

SEQ ID NO: 31521 - DNA, 21 bp, synthetic construct
  source 1..21: mol_type = other DNA; mol_type = other DNA
tactcccgcctaaacggtaat

SEQ ID NO: 31522 - DNA, 21 bp, synthetic construct
  source 1..21: mol_type = other DNA; mol_type = other DNA
taccaccgcctaagtaacaac

SEQ ID NO: 31523 - DNA, 21 bp, synthetic construct
  source 1..21: mol_type = other DNA; mol_type = other DNA
ttccaaagcaccaacgggatc

SEQ ID NO: 31524 - DNA, 21 bp, synthetic construct
  source 1..21: mol_type = other DNA; mol_type = other DNA
tattggtcaggaacaatcgag

SEQ ID NO: 31525 - DNA, 21 bp, synthetic construct
  source 1..21: mol_type = other DNA; mol_type = other DNA
cgcgtgagctgcccgccgcca

SEQ ID NO: 31526 - DNA, 21 bp, synthetic construct
  source 1..21: mol_type = other DNA; mol_type = other DNA
ttaatgaacgacgcgtatgta

SEQ ID NO: 31527 - DNA, 21 bp, synthetic construct
  source 1..21: mol_type = other DNA; mol_type = other DNA
tactattctggaaagatcgac

SEQ ID NO: 31528 - DNA, 21 bp, synthetic construct
  source 1..21: mol_type = other DNA; mol_type = other DNA
aagtatgccttttcctcagaa

SEQ ID NO: 31529 - DNA, 21 bp, synthetic construct
  source 1..21: mol_type = other DNA; mol_type = other DNA
tactcccgcgttaacgctaac

SEQ ID NO: 31530 - DNA, 21 bp, synthetic construct
  source 1..21: mol_type = other DNA; mol_type = other DNA
tgcatgcccggagccgttgag

SEQ ID NO: 31531 - DNA, 21 bp, synthetic construct
  source 1..21: mol_type = other DNA; mol_type = other DNA
tgtagatctacgcccgggatg

SEQ ID NO: 31532 - DNA, 21 bp, synthetic construct
  source 1..21: mol_type = other DNA; mol_type = other DNA
tatgctaggcatgggcccaac

SEQ ID NO: 31533 - DNA, 21 bp, synthetic construct
  source 1..21: mol_type = other DNA; mol_type = other DNA
cgcatgtccgatcacaattgg

SEQ ID NO: 31534 - DNA, 21 bp, synthetic construct
  source 1..21: mol_type = other DNA; mol_type = other DNA
tacctacccgggtgcaaagag

SEQ ID NO: 31535 - DNA, 21 bp, synthetic construct
  source 1..21: mol_type = other DNA; mol_type = other DNA
aaagacgggagttgtaaagcg

SEQ ID NO: 31536 - DNA, 21 bp, synthetic construct
  source 1..21: mol_type = other DNA; mol_type = other DNA
tatgtgaaatcccaagttatc

SEQ ID NO: 31537 - DNA, 21 bp, synthetic construct
  source 1..21: mol_type = other DNA; mol_type = other DNA
tatttccaaggaaggttagag

SEQ ID NO: 31538 - DNA, 21 bp, synthetic construct
  source 1..21: mol_type = other DNA; mol_type = other DNA
cacgcaaggcaatcccctaac

SEQ ID NO: 31539 - DNA, 21 bp, synthetic construct
  source 1..21: mol_type = other DNA; mol_type = other DNA
tgcagagaagggacaccacca

SEQ ID NO: 31540 - DNA, 21 bp, synthetic construct
  source 1..21: mol_type = other DNA; mol_type = other DNA
acaaagtcaaccaatggaatc

SEQ ID NO: 31541 - DNA, 21 bp, synthetic construct
  source 1..21: mol_type = other DNA; mol_type = other DNA
tactggggaggagtggccgca

SEQ ID NO: 31542 - DNA, 21 bp, synthetic construct
  source 1..21: mol_type = other DNA; mol_type = other DNA
tacttgaagaacgacccaacg

SEQ ID NO: 31543 - DNA, 21 bp, synthetic construct
  source 1..21: mol_type = other DNA; mol_type = other DNA
tgtgctaatcacacaaagcct

SEQ ID NO: 31544 - DNA, 21 bp, synthetic construct
  source 1..21: mol_type = other DNA; mol_type = other DNA
gcgagcagtacaaatggaatt

SEQ ID NO: 31545 - DNA, 21 bp, synthetic construct
  source 1..21: mol_type = other DNA; mol_type = other DNA
tattcccggatacatccgaat

SEQ ID NO: 31546 - DNA, 21 bp, synthetic construct
  source 1..21: mol_type = other DNA; mol_type = other DNA
tacgtcaggagtgatgccgga

SEQ ID NO: 31547 - DNA, 21 bp, synthetic construct
  source 1..21: mol_type = other DNA; mol_type = other DNA
tacagcaggcttggaaataac

SEQ ID NO: 31548 - DNA, 21 bp, synthetic construct
  source 1..21: mol_type = other DNA; mol_type = other DNA
tgcaaagaattaaagatggat

SEQ ID NO: 31549 - DNA, 21 bp, synthetic construct
  source 1..21: mol_type = other DNA; mol_type = other DNA
tacttccacggtttgcgggaa

SEQ ID NO: 31550 - DNA, 21 bp, synthetic construct
  source 1..21: mol_type = other DNA; mol_type = other DNA
tggtggagtcaggtccgcgaa

SEQ ID NO: 31551 - DNA, 21 bp, synthetic construct
  source 1..21: mol_type = other DNA; mol_type = other DNA
gatttgagggatagaatttgg

SEQ ID NO: 31552 - DNA, 21 bp, synthetic construct
  source 1..21: mol_type = other DNA; mol_type = other DNA
tatgggagaggatgttgtgga

SEQ ID NO: 31553 - DNA, 21 bp, synthetic construct
  source 1..21: mol_type = other DNA; mol_type = other DNA
atcccacacaaggggataggt

SEQ ID NO: 31554 - DNA, 21 bp, synthetic construct
  source 1..21: mol_type = other DNA; mol_type = other DNA
tacttcagcggcgaaattgca

SEQ ID NO: 31555 - DNA, 21 bp, synthetic construct
  source 1..21: mol_type = other DNA; mol_type = other DNA
ggggtagacgtggtccgctgg

SEQ ID NO: 31556 - DNA, 21 bp, synthetic construct
  source 1..21: mol_type = other DNA; mol_type = other DNA
tggagtagagtcggcgtgaat

SEQ ID NO: 31557 - DNA, 21 bp, synthetic construct
  source 1..21: mol_type = other DNA; mol_type = other DNA
aggttagagagtgcaggatgg

SEQ ID NO: 31558 - DNA, 21 bp, synthetic construct
  source 1..21: mol_type = other DNA; mol_type = other DNA
tgcaagccaccctccgattat

SEQ ID NO: 31559 - DNA, 21 bp, synthetic construct
  source 1..21: mol_type = other DNA; mol_type = other DNA
acttgggacggtcaaaatgct

SEQ ID NO: 31560 - DNA, 21 bp, synthetic construct
  source 1..21: mol_type = other DNA; mol_type = other DNA
tgtaagggttctggcgaacaa

SEQ ID NO: 31561 - DNA, 21 bp, synthetic construct
  source 1..21: mol_type = other DNA; mol_type = other DNA
tatgccaggacaaacgcgaac

SEQ ID NO: 31562 - DNA, 21 bp, synthetic construct
  source 1..21: mol_type = other DNA; mol_type = other DNA
tatgctcgtatagggagtaat

SEQ ID NO: 31563 - DNA, 21 bp, synthetic construct
  source 1..21: mol_type = other DNA; mol_type = other DNA
taccaccgtctccaatcgaca

SEQ ID NO: 31564 - DNA, 21 bp, synthetic construct
  source 1..21: mol_type = other DNA; mol_type = other DNA
tattcaagacagggtataaat

SEQ ID NO: 31565 - DNA, 21 bp, synthetic construct
  source 1..21: mol_type = other DNA; mol_type = other DNA
aaagatgactggacgccctac

SEQ ID NO: 31566 - DNA, 21 bp, synthetic construct
  source 1..21: mol_type = other DNA; mol_type = other DNA
tactcaagaatcagccccaac

SEQ ID NO: 31567 - DNA, 21 bp, synthetic construct
  source 1..21: mol_type = other DNA; mol_type = other DNA
tgtaagcctaggtgctgcgaa

SEQ ID NO: 31568 - DNA, 21 bp, synthetic construct
  source 1..21: mol_type = other DNA; mol_type = other DNA
tgcaagcccgaagcatttcct

SEQ ID NO: 31569 - DNA, 21 bp, synthetic construct
  source 1..21: mol_type = other DNA; mol_type = other DNA
ttttttagtggtaggattgac

SEQ ID NO: 31570 - DNA, 21 bp, synthetic construct
  source 1..21: mol_type = other DNA; mol_type = other DNA
cactggtcgacgaacggagtc

SEQ ID NO: 31571 - DNA, 21 bp, synthetic construct
  source 1..21: mol_type = other DNA; mol_type = other DNA
tattacacaggtagacacgat

SEQ ID NO: 31572 - DNA, 21 bp, synthetic construct
  source 1..21: mol_type = other DNA; mol_type = other DNA
tacgccagaactagccataac

SEQ ID NO: 31573 - DNA, 21 bp, synthetic construct
  source 1..21: mol_type = other DNA; mol_type = other DNA
tattttacggggaacagagat

SEQ ID NO: 31574 - DNA, 21 bp, synthetic construct
  source 1..21: mol_type = other DNA; mol_type = other DNA
tgtaacaaacctatgactatg

SEQ ID NO: 31575 - DNA, 21 bp, synthetic construct
  source 1..21: mol_type = other DNA; mol_type = other DNA
agggatggctcgtctggatgg

SEQ ID NO: 31576 - DNA, 21 bp, synthetic construct
  source 1..21: mol_type = other DNA; mol_type = other DNA
tttagtcggatgaatgcaaat

SEQ ID NO: 31577 - DNA, 21 bp, synthetic construct
  source 1..21: mol_type = other DNA; mol_type = other DNA
cattggagtactaatggcgtg

SEQ ID NO: 31578 - DNA, 21 bp, synthetic construct
  source 1..21: mol_type = other DNA; mol_type = other DNA
cgcgaggatttctctacttgg

SEQ ID NO: 31579 - DNA, 21 bp, synthetic construct
  source 1..21: mol_type = other DNA; mol_type = other DNA
tattatagcggggtaatggca

SEQ ID NO: 31580 - DNA, 21 bp, synthetic construct
  source 1..21: mol_type = other DNA; mol_type = other DNA
ttttttagcggacgaattgac

SEQ ID NO: 31581 - DNA, 21 bp, synthetic construct
  source 1..21: mol_type = other DNA; mol_type = other DNA
tgtagagaggggactcgcctc

SEQ ID NO: 31582 - DNA, 21 bp, synthetic construct
  source 1..21: mol_type = other DNA; mol_type = other DNA
tactttcacggcgtgcaagac

SEQ ID NO: 31583 - DNA, 21 bp, synthetic construct
  source 1..21: mol_type = other DNA; mol_type = other DNA
agagactccacccacggcatc

SEQ ID NO: 31584 - DNA, 21 bp, synthetic construct
  source 1..21: mol_type = other DNA; mol_type = other DNA
tatgctaggatcggcaccaat

SEQ ID NO: 31585 - DNA, 21 bp, synthetic construct
  source 1..21: mol_type = other DNA; mol_type = other DNA
tccatgcaagctcgatcgtgg

SEQ ID NO: 31586 - DNA, 21 bp, synthetic construct
  source 1..21: mol_type = other DNA; mol_type = other DNA
tactcacggataggtcccttc

SEQ ID NO: 31587 - DNA, 21 bp, synthetic construct
  source 1..21: mol_type = other DNA; mol_type = other DNA
tgtaaaagtgacacacgatgg

SEQ ID NO: 31588 - DNA, 21 bp, synthetic construct
  source 1..21: mol_type = other DNA; mol_type = other DNA
tattctagagcaggacacaac

SEQ ID NO: 31589 - DNA, 21 bp, synthetic construct
  source 1..21: mol_type = other DNA; mol_type = other DNA
cgggaggaaatcgtaaggtgg

SEQ ID NO: 31590 - DNA, 21 bp, synthetic construct
  source 1..21: mol_type = other DNA; mol_type = other DNA
tggtggagtgagatcagagag

SEQ ID NO: 31591 - DNA, 21 bp, synthetic construct
  source 1..21: mol_type = other DNA; mol_type = other DNA
catccatcgaaatgtcctccc

SEQ ID NO: 31592 - DNA, 21 bp, synthetic construct
  source 1..21: mol_type = other DNA; mol_type = other DNA
atgcagggaacgagttgcttg

SEQ ID NO: 31593 - DNA, 21 bp, synthetic construct
  source 1..21: mol_type = other DNA; mol_type = other DNA
cgggacaaaacagaaggttgc

SEQ ID NO: 31594 - DNA, 21 bp, synthetic construct
  source 1..21: mol_type = other DNA; mol_type = other DNA
tgtaaactcgacaaagatgac

SEQ ID NO: 31595 - DNA, 21 bp, synthetic construct
  source 1..21: mol_type = other DNA; mol_type = other DNA
atgttaagcgataggacgtgg

SEQ ID NO: 31596 - DNA, 21 bp, synthetic construct
  source 1..21: mol_type = other DNA; mol_type = other DNA
tggaccagcacccacggcgtg

SEQ ID NO: 31597 - DNA, 21 bp, synthetic construct
  source 1..21: mol_type = other DNA; mol_type = other DNA
tactggtcagggacccgcgaa

SEQ ID NO: 31598 - DNA, 21 bp, synthetic construct
  source 1..21: mol_type = other DNA; mol_type = other DNA
ttctggagcggaattcccgct

SEQ ID NO: 31599 - DNA, 21 bp, synthetic construct
  source 1..21: mol_type = other DNA; mol_type = other DNA
gtcgccgatggcctccggtgg

SEQ ID NO: 31600 - DNA, 21 bp, synthetic construct
  source 1..21: mol_type = other DNA; mol_type = other DNA
tgcgcggaccgtaagcaaggg

SEQ ID NO: 31601 - DNA, 21 bp, synthetic construct
  source 1..21: mol_type = other DNA; mol_type = other DNA
tttagcaggttaaatattaat

SEQ ID NO: 31602 - DNA, 21 bp, synthetic construct
  source 1..21: mol_type = other DNA; mol_type = other DNA
tgtagaccacagacgccatcg

SEQ ID NO: 31603 - DNA, 21 bp, synthetic construct
  source 1..21: mol_type = other DNA; mol_type = other DNA
ttcagtcgcgtaggtataaat

SEQ ID NO: 31604 - DNA, 21 bp, synthetic construct
  source 1..21: mol_type = other DNA; mol_type = other DNA
tatgccaggaatggattcaac

SEQ ID NO: 31605 - DNA, 21 bp, synthetic construct
  source 1..21: mol_type = other DNA; mol_type = other DNA
aggaccgagtttgaaggttat

SEQ ID NO: 31606 - DNA, 21 bp, synthetic construct
  source 1..21: mol_type = other DNA; mol_type = other DNA
aaggacgatttcgtttacttc

SEQ ID NO: 31607 - DNA, 21 bp, synthetic construct
  source 1..21: mol_type = other DNA; mol_type = other DNA
tacgctcgaggaaacttcaat

SEQ ID NO: 31608 - DNA, 21 bp, synthetic construct
  source 1..21: mol_type = other DNA; mol_type = other DNA
gcggggtacgatcggctgtgg

SEQ ID NO: 31609 - DNA, 21 bp, synthetic construct
  source 1..21: mol_type = other DNA; mol_type = other DNA
tgtaacaagccgatgcatgcg

SEQ ID NO: 31610 - DNA, 21 bp, synthetic construct
  source 1..21: mol_type = other DNA; mol_type = other DNA
tactcgaagcttggtgcggac

SEQ ID NO: 31611 - DNA, 21 bp, synthetic construct
  source 1..21: mol_type = other DNA; mol_type = other DNA
cacggaaaagcgcagtgtgtc

SEQ ID NO: 31612 - DNA, 21 bp, synthetic construct
  source 1..21: mol_type = other DNA; mol_type = other DNA
gagatgggctcgagtaattgg

SEQ ID NO: 31613 - DNA, 21 bp, synthetic construct
  source 1..21: mol_type = other DNA; mol_type = other DNA
acaacggactacgtgatgtat

SEQ ID NO: 31614 - DNA, 21 bp, synthetic construct
  source 1..21: mol_type = other DNA; mol_type = other DNA
cgtacgtacgagacattccca

SEQ ID NO: 31615 - DNA, 21 bp, synthetic construct
  source 1..21: mol_type = other DNA; mol_type = other DNA
gtcaacgattacttatcatac

SEQ ID NO: 31616 - DNA, 21 bp, synthetic construct
  source 1..21: mol_type = other DNA; mol_type = other DNA
tattcccgtacaggtcataat

SEQ ID NO: 31617 - DNA, 21 bp, synthetic construct
  source 1..21: mol_type = other DNA; mol_type = other DNA
tactggagcggcatgcacgaa

SEQ ID NO: 31618 - DNA, 21 bp, synthetic construct
  source 1..21: mol_type = other DNA; mol_type = other DNA
tactacactggacaaaccgaa

SEQ ID NO: 31619 - DNA, 21 bp, synthetic construct
  source 1..21: mol_type = other DNA; mol_type = other DNA
ggagacgagtgggttggatac

SEQ ID NO: 31620 - DNA, 21 bp, synthetic construct
  source 1..21: mol_type = other DNA; mol_type = other DNA
tattcgaagaatgggaacaat

SEQ ID NO: 31621 - DNA, 21 bp, synthetic construct
  source 1..21: mol_type = other DNA; mol_type = other DNA
tatagtagggcaaatgataac

SEQ ID NO: 31622 - DNA, 21 bp, synthetic construct
  source 1..21: mol_type = other DNA; mol_type = other DNA
tgcataacgagagagcacgtt

SEQ ID NO: 31623 - DNA, 21 bp, synthetic construct
  source 1..21: mol_type = other DNA; mol_type = other DNA
attgctgacggtcttaggtgg

SEQ ID NO: 31624 - DNA, 21 bp, synthetic construct
  source 1..21: mol_type = other DNA; mol_type = other DNA
tactggacaggtacgaccgaa

SEQ ID NO: 31625 - DNA, 21 bp, synthetic construct
  source 1..21: mol_type = other DNA; mol_type = other DNA
tgtagggagatgggtgttggt

SEQ ID NO: 31626 - DNA, 21 bp, synthetic construct
  source 1..21: mol_type = other DNA; mol_type = other DNA
tactccagagcaggcgcgaat

SEQ ID NO: 31627 - DNA, 21 bp, synthetic construct
  source 1..21: mol_type = other DNA; mol_type = other DNA
tatgtccgaagcgggacgaac

SEQ ID NO: 31628 - DNA, 21 bp, synthetic construct
  source 1..21: mol_type = other DNA; mol_type = other DNA
cgtatggataacgtgtttccg

SEQ ID NO: 31629 - DNA, 21 bp, synthetic construct
  source 1..21: mol_type = other DNA; mol_type = other DNA
gataagtatctaaacacatgt

SEQ ID NO: 31630 - DNA, 21 bp, synthetic construct
  source 1..21: mol_type = other DNA; mol_type = other DNA
tgcacctcgaagacgggggat

SEQ ID NO: 31631 - DNA, 21 bp, synthetic construct
  source 1..21: mol_type = other DNA; mol_type = other DNA
tattctaggatgggatcgaat

SEQ ID NO: 31632 - DNA, 21 bp, synthetic construct
  source 1..21: mol_type = other DNA; mol_type = other DNA
tgcaaaccacgaccagaagca

SEQ ID NO: 31633 - DNA, 21 bp, synthetic construct
  source 1..21: mol_type = other DNA; mol_type = other DNA
gggtcagagtttacaagtttc

SEQ ID NO: 31634 - DNA, 21 bp, synthetic construct
  source 1..21: mol_type = other DNA; mol_type = other DNA
ttgcacagattacatgctgat

SEQ ID NO: 31635 - DNA, 21 bp, synthetic construct
  source 1..21: mol_type = other DNA; mol_type = other DNA
atcggctcaaaggggtgggat

SEQ ID NO: 31636 - DNA, 21 bp, synthetic construct
  source 1..21: mol_type = other DNA; mol_type = other DNA
tgtaggccccccatgccgccg

SEQ ID NO: 31637 - DNA, 21 bp, synthetic construct
  source 1..21: mol_type = other DNA; mol_type = other DNA
tattcaagatcgggatcgaat

SEQ ID NO: 31638 - DNA, 21 bp, synthetic construct
  source 1..21: mol_type = other DNA; mol_type = other DNA
tacgttcgcttcgatgccaac

SEQ ID NO: 31639 - DNA, 21 bp, synthetic construct
  source 1..21: mol_type = other DNA; mol_type = other DNA
tatgcgcgaaccaatcacaac

SEQ ID NO: 31640 - DNA, 21 bp, synthetic construct
  source 1..21: mol_type = other DNA; mol_type = other DNA
tattataccggaaaacttagt

SEQ ID NO: 31641 - DNA, 21 bp, synthetic construct
  source 1..21: mol_type = other DNA; mol_type = other DNA
tggtttagcggtattcaagag

SEQ ID NO: 31642 - DNA, 21 bp, synthetic construct
  source 1..21: mol_type = other DNA; mol_type = other DNA
aggacctacgattccttcgca

SEQ ID NO: 31643 - DNA, 21 bp, synthetic construct
  source 1..21: mol_type = other DNA; mol_type = other DNA
tattggagtggcatgcgggag

SEQ ID NO: 31644 - DNA, 21 bp, synthetic construct
  source 1..21: mol_type = other DNA
agggagccacactgctgcggt

SEQ ID NO: 31645 - DNA, 21 bp, synthetic construct
  source 1..21: mol_type = other DNA
caaatggaagatagagcttgg

SEQ ID NO: 31646 - DNA, 21 bp, synthetic construct
  source 1..21: mol_type = other DNA
tgccacaagccaatgaccgct

SEQ ID NO: 31647 - DNA, 21 bp, synthetic construct
  source 1..21: mol_type = other DNA
tatcaccgaatcggcactaat

SEQ ID NO: 31648 - DNA, 21 bp, synthetic construct
  source 1..21: mol_type = other DNA; mol_type = other DNA
tgcgtggttcgttccgcaggg

SEQ ID NO: 31649 - DNA, 21 bp, synthetic construct
  source 1..21: mol_type = other DNA; mol_type = other DNA
tacgcctcgaccaatggtgtg

SEQ ID NO: 31650 - DNA, 21 bp, synthetic construct
  source 1..21: mol_type = other DNA; mol_type = other DNA
ccatgcaaaccccagccgatg

SEQ ID NO: 31651 - DNA, 21 bp, synthetic construct
  source 1..21: mol_type = other DNA; mol_type = other DNA
ctgcaatccacaaatggcatc

SEQ ID NO: 31652 - DNA, 21 bp, synthetic construct
  source 1..21: mol_type = other DNA; mol_type = other DNA
tacagccgccaaaacattaac

SEQ ID NO: 31653 - DNA, 21 bp, synthetic construct
  source 1..21: mol_type = other DNA; mol_type = other DNA
tactacactggtatgagagat

SEQ ID NO: 31654 - DNA, 21 bp, synthetic construct
  source 1..21: mol_type = other DNA; mol_type = other DNA
tttcattcaaccaacggtgtt

SEQ ID NO: 31655 - DNA, 21 bp, synthetic construct
  source 1..21: mol_type = other DNA; mol_type = other DNA
tatgcaaggctcggggttaac

SEQ ID NO: 31656 - DNA, 21 bp, synthetic construct
  source 1..21: mol_type = other DNA; mol_type = other DNA
agggacgattggacggtcttc

SEQ ID NO: 31657 - DNA, 21 bp, synthetic construct
  source 1..21: mol_type = other DNA; mol_type = other DNA
tattctcgacagaatatcaac

SEQ ID NO: 31658 - DNA, 21 bp, synthetic construct
  source 1..21: mol_type = other DNA; mol_type = other DNA
tactcacgtatggggatgaac

SEQ ID NO: 31659 - DNA, 21 bp, synthetic construct
  source 1..21: mol_type = other DNA; mol_type = other DNA
tatgctagattaggtcaaaat

SEQ ID NO: 31660 - DNA, 21 bp, synthetic construct
  source 1..21: mol_type = other DNA; mol_type = other DNA
ttacacaagttatgcgaagac

SEQ ID NO: 31661 - DNA, 21 bp, synthetic construct
  source 1..21: mol_type = other DNA; mol_type = other DNA
ttttttacaggtatgagagaa

SEQ ID NO: 31662 - DNA, 21 bp, synthetic construct
  source 1..21: mol_type = other DNA; mol_type = other DNA
agagacgactacagtagttac

SEQ ID NO: 31663 - DNA, 21 bp, synthetic construct
  source 1..21: mol_type = other DNA; mol_type = other DNA
tgcaaagacgccacgcgtatg

SEQ ID NO: 31664 - DNA, 21 bp, synthetic construct
  source 1..21: mol_type = other DNA; mol_type = other DNA
tactggacagggtgtatggaa

SEQ ID NO: 31665 - DNA, 21 bp, synthetic construct
  source 1..21: mol_type = other DNA; mol_type = other DNA
tgtggaggaggaaggcaaacg

SEQ ID NO: 31666 - DNA, 21 bp, synthetic construct
  source 1..21: mol_type = other DNA; mol_type = other DNA
tacgcaagaagcaatatcaac

SEQ ID NO: 31667 - DNA, 21 bp, synthetic construct
  source 1..21: mol_type = other DNA; mol_type = other DNA
cgcgaggattattcgacctac

SEQ ID NO: 31668 - DNA, 21 bp, synthetic construct
  source 1..21: mol_type = other DNA; mol_type = other DNA
tacagccgcatctcgggcaac

SEQ ID NO: 31669 - DNA, 21 bp, synthetic construct
  source 1..21: mol_type = other DNA; mol_type = other DNA
ttaagtaagatgaacgtgaac

SEQ ID NO: 31670 - DNA, 21 bp, synthetic construct
  source 1..21: mol_type = other DNA; mol_type = other DNA
tattcgaggcacggtataaat

SEQ ID NO: 31671 - DNA, 21 bp, synthetic construct
  source 1..21: mol_type = other DNA; mol_type = other DNA
tgcttgccaacgcactgcgga

SEQ ID NO: 31672 - DNA, 21 bp, synthetic construct
  source 1..21: mol_type = other DNA; mol_type = other DNA
tattttagtggcgtaaatcgc

SEQ ID NO: 31673 - DNA, 21 bp, synthetic construct
  source 1..21: mol_type = other DNA; mol_type = other DNA
tgcaacatgccgatgaccgca

SEQ ID NO: 31674 - DNA, 21 bp, synthetic construct
  source 1..21: mol_type = other DNA; mol_type = other DNA
aggatggaatcggccgattgg

SEQ ID NO: 31675 - DNA, 21 bp, synthetic construct
  source 1..21: mol_type = other DNA; mol_type = other DNA
tctgatgaatattcaacctac

SEQ ID NO: 31676 - DNA, 21 bp, synthetic construct
  source 1..21: mol_type = other DNA; mol_type = other DNA
tggtggtcagaaatacgggaa

SEQ ID NO: 31677 - DNA, 21 bp, synthetic construct
  source 1..21: mol_type = other DNA; mol_type = other DNA
tactccagaataggacccgta

SEQ ID NO: 31678 - DNA, 21 bp, synthetic construct
  source 1..21: mol_type = other DNA; mol_type = other DNA
ggggggcctggcgtaaggtgg

SEQ ID NO: 31679 - DNA, 21 bp, synthetic construct
  source 1..21: mol_type = other DNA; mol_type = other DNA
tatcacagacttggggaacca

SEQ ID NO: 31680 - DNA, 21 bp, synthetic construct
  source 1..21: mol_type = other DNA; mol_type = other DNA
gccgggtttgatagaggatgg

SEQ ID NO: 31681 - DNA, 21 bp, synthetic construct
  source 1..21: mol_type = other DNA; mol_type = other DNA
agagagtacgaagtattccct

SEQ ID NO: 31682 - DNA, 21 bp, synthetic construct
  source 1..21: mol_type = other DNA; mol_type = other DNA
tactcgaggatgaacatcaac

SEQ ID NO: 31683 - DNA, 21 bp, synthetic construct
  source 1..21: mol_type = other DNA; mol_type = other DNA
gttatggaagctaggcagtgg

SEQ ID NO: 31684 - DNA, 21 bp, synthetic construct
  source 1..21: mol_type = other DNA; mol_type = other DNA
tacttcagtggagtccgtacg

SEQ ID NO: 31685 - DNA, 21 bp, synthetic construct
  source 1..21: mol_type = other DNA; mol_type = other DNA
atgcaatcaacgaacggggta

SEQ ID NO: 31686 - DNA, 21 bp, synthetic construct
  source 1..21: mol_type = other DNA; mol_type = other DNA
tactctcgccagggggttaat

SEQ ID NO: 31687 - DNA, 21 bp, synthetic construct
  source 1..21: mol_type = other DNA; mol_type = other DNA
tattcacgcgtaaacaacaac

SEQ ID NO: 31688 - DNA, 21 bp, synthetic construct
  source 1..21: mol_type = other DNA; mol_type = other DNA
tactcaagaataggtaacaac

SEQ ID NO: 31689 - DNA, 21 bp, synthetic construct
  source 1..21: mol_type = other DNA; mol_type = other DNA
ttgtcaaaggctgcaactaac

SEQ ID NO: 31690 - DNA, 21 bp, synthetic construct
  source 1..21: mol_type = other DNA; mol_type = other DNA
tgtgataaagcaccaaaagag

SEQ ID NO: 31691 - DNA, 21 bp, synthetic construct
  source 1..21: mol_type = other DNA; mol_type = other DNA
tcaagcagcagtaacggggtc

SEQ ID NO: 31692 - DNA, 21 bp, synthetic construct
  source 1..21: mol_type = other DNA; mol_type = other DNA
tattcgaggttgaatggaaac

SEQ ID NO: 31693 - DNA, 21 bp, synthetic construct
  source 1..21: mol_type = other DNA; mol_type = other DNA
tatgcgcgtcaaggaatgaac

SEQ ID NO: 31694 - DNA, 21 bp, synthetic construct
  source 1..21: mol_type = other DNA; mol_type = other DNA
ttctctaggatgaatgtgaat

SEQ ID NO: 31695 - DNA, 21 bp, synthetic construct
  source 1..21: mol_type = other DNA; mol_type = other DNA
tatagccgaagcaatgctaat

SEQ ID NO: 31696 - DNA, 21 bp, synthetic construct
  source 1..21: mol_type = other DNA; mol_type = other DNA
tatagccgaatgggcgaaaat

SEQ ID NO: 31697 - DNA, 21 bp, synthetic construct
  source 1..21: mol_type = other DNA; mol_type = other DNA
aagcatgactactgtgcaccg

SEQ ID NO: 31698 - DNA, 21 bp, synthetic construct
  source 1..21: mol_type = other DNA; mol_type = other DNA
tgccgccccacctgcaagcct

SEQ ID NO: 31699 - DNA, 21 bp, synthetic construct
  source 1..21: mol_type = other DNA; mol_type = other DNA
tatgcgaaagcgggacttaac

SEQ ID NO: 31700 - DNA, 21 bp, synthetic construct
  source 1..21: mol_type = other DNA; mol_type = other DNA
tactctagggtcaataccaat

SEQ ID NO: 31701 - DNA, 21 bp, synthetic construct
  source 1..21: mol_type = other DNA; mol_type = other DNA
taccacaggctcggtgaccac

SEQ ID NO: 31702 - DNA, 21 bp, synthetic construct
  source 1..21: mol_type = other DNA; mol_type = other DNA
tactcgcgaatgaacgtaaat

SEQ ID NO: 31703 - DNA, 21 bp, synthetic construct
  source 1..21: mol_type = other DNA; mol_type = other DNA
tactcacgtaaaggcgataac

SEQ ID NO: 31704 - DNA, 21 bp, synthetic construct
  source 1..21: mol_type = other DNA; mol_type = other DNA
tgtacgataaagactggtcac

SEQ ID NO: 31705 - DNA, 21 bp, synthetic construct
  source 1..21: mol_type = other DNA; mol_type = other DNA
agaacatacgactcgattgcc

SEQ ID NO: 31706 - DNA, 21 bp, synthetic construct
  source 1..21: mol_type = other DNA; mol_type = other DNA
tacgctagagtaggctacaac

SEQ ID NO: 31707 - DNA, 21 bp, synthetic construct
  source 1..21: mol_type = other DNA; mol_type = other DNA
aggaatagggatgtgtatccg

SEQ ID NO: 31708 - DNA, 21 bp, synthetic construct
  source 1..21: mol_type = other DNA; mol_type = other DNA
catcactccacaaacggaatc

SEQ ID NO: 31709 - DNA, 21 bp, synthetic construct
  source 1..21: mol_type = other DNA; mol_type = other DNA
tattcgaggatgggccaaaat

SEQ ID NO: 31710 - DNA, 21 bp, synthetic construct
  source 1..21: mol_type = other DNA; mol_type = other DNA
tgcaagccagaggcaacgtgg

SEQ ID NO: 31711 - DNA, 21 bp, synthetic construct
  source 1..21: mol_type = other DNA; mol_type = other DNA
tactggcacggggtgagcgaa

SEQ ID NO: 31712 - DNA, 21 bp, synthetic construct
  source 1..21: mol_type = other DNA; mol_type = other DNA
tattctcggatcggctataac

SEQ ID NO: 31713 - DNA, 21 bp, synthetic construct
  source 1..21: mol_type = other DNA; mol_type = other DNA
tatagtagaatgtcagataac

SEQ ID NO: 31714 - DNA, 21 bp, synthetic construct
  source 1..21: mol_type = other DNA; mol_type = other DNA
tgcgagagagtgggtccgacc

SEQ ID NO: 31715 - DNA, 21 bp, synthetic construct
  source 1..21: mol_type = other DNA; mol_type = other DNA
acgtgggatgggcagaacgcc

SEQ ID NO: 31716 - DNA, 21 bp, synthetic construct
  source 1..21: mol_type = other DNA; mol_type = other DNA
tgcaagtcacgaagccttgat

SEQ ID NO: 31717 - DNA, 21 bp, synthetic construct
  source 1..21: mol_type = other DNA; mol_type = other DNA
ataccggagcgttgttgcaaa

SEQ ID NO: 31718 - DNA, 21 bp, synthetic construct
  source 1..21: mol_type = other DNA; mol_type = other DNA
tattcccgtcacaatgtaaac

SEQ ID NO: 31719 - DNA, 21 bp, synthetic construct
  source 1..21: mol_type = other DNA; mol_type = other DNA
tatgtgaggagcaacgctaac

SEQ ID NO: 31720 - DNA, 21 bp, synthetic construct
  source 1..21: mol_type = other DNA; mol_type = other DNA
aagtatgctaggagttctgag

SEQ ID NO: 31721 - DNA, 21 bp, synthetic construct
  source 1..21: mol_type = other DNA; mol_type = other DNA
tattggagtaacgtaaaggat

SEQ ID NO: 31722 - DNA, 21 bp, synthetic construct
  source 1..21: mol_type = other DNA; mol_type = other DNA
tgtatgaagccgcgtttggag

SEQ ID NO: 31723 - DNA, 21 bp, synthetic construct
  source 1..21: mol_type = other DNA; mol_type = other DNA
tttgatagtactaacggaatt

SEQ ID NO: 31724 - DNA, 21 bp, synthetic construct
  source 1..21: mol_type = other DNA; mol_type = other DNA
cgggaagaaaatgtctattgg

SEQ ID NO: 31725 - DNA, 21 bp, synthetic construct
  source 1..21: mol_type = other DNA; mol_type = other DNA
ccctacgccaagagtgtagac

SEQ ID NO: 31726 - DNA, 21 bp, synthetic construct
  source 1..21: mol_type = other DNA; mol_type = other DNA
tatgcgaaaagcaatcctaat

SEQ ID NO: 31727 - DNA, 21 bp, synthetic construct
  source 1..21: mol_type = other DNA; mol_type = other DNA
tactctaggttacaagaaaga

SEQ ID NO: 31728 - DNA, 21 bp, synthetic construct
  source 1..21: mol_type = other DNA; mol_type = other DNA
tctcagtccactaatggcatt

SEQ ID NO: 31729 - DNA, 21 bp, synthetic construct
  source 1..21: mol_type = other DNA; mol_type = other DNA
tactttagcggcttgagagca

SEQ ID NO: 31730 - DNA, 21 bp, synthetic construct
  source 1..21: mol_type = other DNA; mol_type = other DNA
tggttttcaggcattaccgaa

SEQ ID NO: 31731 - DNA, 21 bp, synthetic construct
  source 1..21: mol_type = other DNA; mol_type = other DNA
tacagtaggaacgggatgaat

SEQ ID NO: 31732 - DNA, 21 bp, synthetic construct
  source 1..21: mol_type = other DNA; mol_type = other DNA
tgtggtaagatcccgccgccc

SEQ ID NO: 31733 - DNA, 21 bp, synthetic construct
  source 1..21: mol_type = other DNA; mol_type = other DNA
atttcggtttgtaaacagcaa

SEQ ID NO: 31734 - DNA, 21 bp, synthetic construct
  source 1..21: mol_type = other DNA; mol_type = other DNA
cgcggagattttagttcgtgg

SEQ ID NO: 31735 - DNA, 21 bp, synthetic construct
  source 1..21: mol_type = other DNA; mol_type = other DNA
tattttcacggtttgacagcc

SEQ ID NO: 31736 - DNA, 21 bp, synthetic construct
  source 1..21: mol_type = other DNA; mol_type = other DNA
cgaatggaatcatcggattgg

SEQ ID NO: 31737 - DNA, 21 bp, synthetic construct
  source 1..21: mol_type = other DNA; mol_type = other DNA
tactctcgtaagagcgataat

SEQ ID NO: 31738 - DNA, 21 bp, synthetic construct
  source 1..21: mol_type = other DNA; mol_type = other DNA
gggggaccgtcatgcaagcca

SEQ ID NO: 31739 - DNA, 21 bp, synthetic construct
  source 1..21: mol_type = other DNA; mol_type = other DNA
tattggagcggcaagcacgaa

SEQ ID NO: 31740 - DNA, 21 bp, synthetic construct
  source 1..21: mol_type = other DNA; mol_type = other DNA
tgcaatcaaaataataaacct

SEQ ID NO: 31741 - DNA, 21 bp, synthetic construct
  source 1..21: mol_type = other DNA; mol_type = other DNA
attcagagcagtaacggcgtg

SEQ ID NO: 31742 - DNA, 21 bp, synthetic construct
  source 1..21: mol_type = other DNA; mol_type = other DNA
cgcagcgagttcacgagctac

SEQ ID NO: 31743 - DNA, 21 bp, synthetic construct
  source 1..21: mol_type = other DNA; mol_type = other DNA
ttgtgtaggccgtgtctcact

SEQ ID NO: 31744 - DNA, 21 bp, synthetic construct
  source 1..21: mol_type = other DNA; mol_type = other DNA
tgtaaggtaaagatgcctccg

SEQ ID NO: 31745 - DNA, 21 bp, synthetic construct
  source 1..21: mol_type = other DNA; mol_type = other DNA
ggagacgagtggcaacacttt

SEQ ID NO: 31746 - DNA, 21 bp, synthetic construct
  source 1..21: mol_type = other DNA; mol_type = other DNA
tgggtcagatcggatgtgagg

SEQ ID NO: 31747 - DNA, 21 bp, synthetic construct
  source 1..21: mol_type = other DNA; mol_type = other DNA
agcaattcgagcttaaactgc

SEQ ID NO: 31748 - DNA, 21 bp, synthetic construct
  source 1..21: mol_type = other DNA; mol_type = other DNA
tacttccacgggagacacgac

SEQ ID NO: 31749 - DNA, 21 bp, synthetic construct
  source 1..21: mol_type = other DNA; mol_type = other DNA
atgtgggatggcacaatggcc

SEQ ID NO: 31750 - DNA, 21 bp, synthetic construct
  source 1..21: mol_type = other DNA; mol_type = other DNA
tactggtctggccgcgctgac

SEQ ID NO: 31751 - DNA, 21 bp, synthetic construct
  source 1..21: mol_type = other DNA; mol_type = other DNA
tctatgcaggataggaattgg

SEQ ID NO: 31752 - DNA, 21 bp, synthetic construct
  source 1..21: mol_type = other DNA; mol_type = other DNA
cgagaacaaactgtccattgg

SEQ ID NO: 31753 - DNA, 21 bp, synthetic construct
  source 1..21: mol_type = other DNA; mol_type = other DNA
tatgctagactaaactttaac

SEQ ID NO: 31754 - DNA, 21 bp, synthetic construct
  source 1..21: mol_type = other DNA; mol_type = other DNA
ttctctagagcagggatcaat

SEQ ID NO: 31755 - DNA, 21 bp, synthetic construct
  source 1..21: mol_type = other DNA; mol_type = other DNA
agttgtaaggagaggatgcct

SEQ ID NO: 31756 - DNA, 21 bp, synthetic construct
  source 1..21: mol_type = other DNA; mol_type = other DNA
tgcaagctagggaatgtcagt

SEQ ID NO: 31757 - DNA, 21 bp, synthetic construct
  source 1..21: mol_type = other DNA; mol_type = other DNA
cagacgtcgactaacggaaga

SEQ ID NO: 31758 - DNA, 21 bp, synthetic construct
  source 1..21: mol_type = other DNA; mol_type = other DNA
tactggtcggggcggaatgat

SEQ ID NO: 31759 - DNA, 21 bp, synthetic construct
  source 1..21: mol_type = other DNA; mol_type = other DNA
tacgaaagtaccaacggcatc

SEQ ID NO: 31760 - DNA, 21 bp, synthetic construct
  source 1..21: mol_type = other DNA; mol_type = other DNA
tactggagtggaaaaatagat

SEQ ID NO: 31761 - DNA, 21 bp, synthetic construct
  source 1..21: mol_type = other DNA; mol_type = other DNA
tactccaggagtggtaacaat

SEQ ID NO: 31762 - DNA, 21 bp, synthetic construct
  source 1..21: mol_type = other DNA; mol_type = other DNA
atagacgagtggcaccacttc

SEQ ID NO: 31763 - DNA, 21 bp, synthetic construct
  source 1..21: mol_type = other DNA; mol_type = other DNA
tattacacaggtcagattgac

SEQ ID NO: 31764 - DNA, 21 bp, synthetic construct
  source 1..21: mol_type = other DNA; mol_type = other DNA
gagctagagtcttggtcatgg

SEQ ID NO: 31765 - DNA, 21 bp, synthetic construct
  source 1..21: mol_type = other DNA; mol_type = other DNA
tgcaaaggccttccagtgcca

SEQ ID NO: 31766 - DNA, 21 bp, synthetic construct
  source 1..21: mol_type = other DNA; mol_type = other DNA
acagatgattggagttcatac

SEQ ID NO: 31767 - DNA, 21 bp, synthetic construct
  source 1..21: mol_type = other DNA; mol_type = other DNA
cattgcagaccctgttcggag

SEQ ID NO: 31768 - DNA, 21 bp, synthetic construct
  source 1..21: mol_type = other DNA; mol_type = other DNA
cgtagcgactttacttcatac

SEQ ID NO: 31769 - DNA, 21 bp, synthetic construct
  source 1..21: mol_type = other DNA; mol_type = other DNA
cgtggaggagacaggtcatgg

SEQ ID NO: 31770 - DNA, 21 bp, synthetic construct
  source 1..21: mol_type = other DNA; mol_type = other DNA
tgtaaacctaactcaggcggg

SEQ ID NO: 31771 - DNA, 21 bp, synthetic construct
  source 1..21: mol_type = other DNA; mol_type = other DNA
tgtaagggtggaggagccgga

SEQ ID NO: 31772 - DNA, 21 bp, synthetic construct
  source 1..21: mol_type = other DNA; mol_type = other DNA
tacgcaagaaatgggatgaat

SEQ ID NO: 31773 - DNA, 21 bp, synthetic construct
  source 1..21: mol_type = other DNA; mol_type = other DNA
tacttcagcggattgcgggag

SEQ ID NO: 31774 - DNA, 21 bp, synthetic construct
  source 1..21: mol_type = other DNA; mol_type = other DNA
tactttcacggcttgattgca

SEQ ID NO: 31775 - DNA, 21 bp, synthetic construct
  source 1..21: mol_type = other DNA; mol_type = other DNA
tggtgtcgcagtcaagcaggt

SEQ ID NO: 31776 - DNA, 21 bp, synthetic construct
  source 1..21: mol_type = other DNA; mol_type = other DNA
tactatactggtcgcactaat

SEQ ID NO: 31777 - DNA, 21 bp, synthetic construct
  source 1..21: mol_type = other DNA; mol_type = other DNA
tcgtggagttcaaacggcgta

SEQ ID NO: 31778 - DNA, 21 bp, synthetic construct
  source 1..21: mol_type = other DNA; mol_type = other DNA
tactcccgtgtaaatctcaac

SEQ ID NO: 31779 - DNA, 21 bp, synthetic construct
  source 1..21: mol_type = other DNA; mol_type = other DNA
ttcttcacaggacgtatggac

SEQ ID NO: 31780 - DNA, 21 bp, synthetic construct
  source 1..21: mol_type = other DNA; mol_type = other DNA
ttcacctcttcaaatggagta

SEQ ID NO: 31781 - DNA, 21 bp, synthetic construct
  source 1..21: mol_type = other DNA; mol_type = other DNA
tatagtcgacaaggagcgaac

SEQ ID NO: 31782 - DNA, 21 bp, synthetic construct
  source 1..21: mol_type = other DNA; mol_type = other DNA
tactcacgggcaaacccaaac

SEQ ID NO: 31783 - DNA, 21 bp, synthetic construct
  source 1..21: mol_type = other DNA; mol_type = other DNA
tgtaagttatcaagtccgtcg

SEQ ID NO: 31784 - DNA, 21 bp, synthetic construct
  source 1..21: mol_type = other DNA; mol_type = other DNA
tacgctagagccgggtacaat

SEQ ID NO: 31785 - DNA, 21 bp, synthetic construct
  source 1..21: mol_type = other DNA; mol_type = other DNA
tacgcgaggttaaatcataac

SEQ ID NO: 31786 - DNA, 21 bp, synthetic construct
  source 1..21: mol_type = other DNA; mol_type = other DNA
ctgcatcggttacaccccgac

SEQ ID NO: 31787 - DNA, 21 bp, synthetic construct
  source 1..21: mol_type = other DNA; mol_type = other DNA
tttagtcgagcaaacattaac

SEQ ID NO: 31788 - DNA, 21 bp, synthetic construct
  source 1..21: mol_type = other DNA; mol_type = other DNA
gatttatcaagtctggactgg

SEQ ID NO: 31789 - DNA, 21 bp, synthetic construct
  source 1..21: mol_type = other DNA; mol_type = other DNA
gtagatgcttcatgtagtgct

SEQ ID NO: 31790 - DNA, 21 bp, synthetic construct
  source 1..21: mol_type = other DNA; mol_type = other DNA
tacagtcgcatgggtgacaat

SEQ ID NO: 31791 - DNA, 21 bp, synthetic construct
  source 1..21: mol_type = other DNA; mol_type = other DNA
gacctcaacagtgccaagtgg

SEQ ID NO: 31792 - DNA, 21 bp, synthetic construct
  source 1..21: mol_type = other DNA; mol_type = other DNA
ggcggcggcacgaagtgtggt

SEQ ID NO: 31793 - DNA, 21 bp, synthetic construct
  source 1..21: mol_type = other DNA; mol_type = other DNA
tccatgcaggacaggacatgg

SEQ ID NO: 31794 - DNA, 21 bp, synthetic construct
  source 1..21: mol_type = other DNA; mol_type = other DNA
ttcgccagaacgggttgggac

SEQ ID NO: 31795 - DNA, 21 bp, synthetic construct
  source 1..21: mol_type = other DNA; mol_type = other DNA
ttcttctccggtgttagagac

SEQ ID NO: 31796 - DNA, 21 bp, synthetic construct
  source 1..21: mol_type = other DNA; mol_type = other DNA
tattatacaggccgcacagat

SEQ ID NO: 31797 - DNA, 21 bp, synthetic construct
  source 1..21: mol_type = other DNA; mol_type = other DNA
tatgtaagatcagatccaatg

SEQ ID NO: 31798 - DNA, 21 bp, synthetic construct
  source 1..21: mol_type = other DNA; mol_type = other DNA
ggatctgagggcagcacctgg

SEQ ID NO: 31799 - DNA, 21 bp, synthetic construct
  source 1..21: mol_type = other DNA; mol_type = other DNA
ggcgggctgggctcgcagtgg

SEQ ID NO: 31800 - DNA, 21 bp, synthetic construct
  source 1..21: mol_type = other DNA; mol_type = other DNA
tgcaagccacctatggatggt

SEQ ID NO: 31801 - DNA, 21 bp, synthetic construct
  source 1..21: mol_type = other DNA; mol_type = other DNA
cccggctctactcggacctgg

SEQ ID NO: 31802 - DNA, 21 bp, synthetic construct
  source 1..21: mol_type = other DNA; mol_type = other DNA
caaggtgagagtcgagtgtgg

SEQ ID NO: 31803 - DNA, 21 bp, synthetic construct
  source 1..21: mol_type = other DNA; mol_type = other DNA
tcgctcgccgacaggggctgg

SEQ ID NO: 31804 - DNA, 21 bp, synthetic construct
  source 1..21: mol_type = other DNA; mol_type = other DNA
tacgttagaagtggaggtgga

SEQ ID NO: 31805 - DNA, 21 bp, synthetic construct
  source 1..21: mol_type = other DNA; mol_type = other DNA
tgtaagccctcatcaccttat

SEQ ID NO: 31806 - DNA, 21 bp, synthetic construct
  source 1..21: mol_type = other DNA; mol_type = other DNA
tactcaaagttaaataaaaac

SEQ ID NO: 31807 - DNA, 21 bp, synthetic construct
  source 1..21: mol_type = other DNA; mol_type = other DNA
tacgctagacaaaactttaac

SEQ ID NO: 31808 - DNA, 21 bp, synthetic construct
  source 1..21: mol_type = other DNA; mol_type = other DNA
tgtcgttcgcgcatggcggaa

SEQ ID NO: 31809 - DNA, 21 bp, synthetic construct
  source 1..21: mol_type = other DNA; mol_type = other DNA
tactttgccggtaaaatggcc

SEQ ID NO: 31810 - DNA, 21 bp, synthetic construct
  source 1..21: mol_type = other DNA; mol_type = other DNA
tatagcaagaataattttaat

SEQ ID NO: 31811 - DNA, 21 bp, synthetic construct
  source 1..21: mol_type = other DNA; mol_type = other DNA
tggttttcaggtaaagtagat

SEQ ID NO: 31812 - DNA, 21 bp, synthetic construct
  source 1..21: mol_type = other DNA; mol_type = other DNA
tatgccagaggcggctttaat

SEQ ID NO: 31813 - DNA, 21 bp, synthetic construct
  source 1..21: mol_type = other DNA; mol_type = other DNA
gcgccccctgaggtacggtgg

SEQ ID NO: 31814 - DNA, 21 bp, synthetic construct
  source 1..21: mol_type = other DNA; mol_type = other DNA
gttgatgactggtcgcccttt

SEQ ID NO: 31815 - DNA, 21 bp, synthetic construct
  source 1..21: mol_type = other DNA; mol_type = other DNA
tatttcagtggcatgacggag

SEQ ID NO: 31816 - DNA, 21 bp, synthetic construct
  source 1..21: mol_type = other DNA; mol_type = other DNA
ggcttcgaaaccgtccgttgg

SEQ ID NO: 31817 - DNA, 21 bp, synthetic construct
  source 1..21: mol_type = other DNA; mol_type = other DNA
cactggtcgactaacggggtc

SEQ ID NO: 31818 - DNA, 21 bp, synthetic construct
  source 1..21: mol_type = other DNA; mol_type = other DNA
tacgtaaggtcccaaccccaa

SEQ ID NO: 31819 - DNA, 21 bp, synthetic construct
  source 1..21: mol_type = other DNA; mol_type = other DNA
ctggacgactggactggattt

SEQ ID NO: 31820 - DNA, 21 bp, synthetic construct
  source 1..21: mol_type = other DNA; mol_type = other DNA
aagaccccgatgtgtaaagca

SEQ ID NO: 31821 - DNA, 21 bp, synthetic construct
  source 1..21: mol_type = other DNA; mol_type = other DNA
tttggaggggttagtgcttac

SEQ ID NO: 31822 - DNA, 21 bp, synthetic construct
  source 1..21: mol_type = other DNA; mol_type = other DNA
tattcaagaataaattataac

SEQ ID NO: 31823 - DNA, 21 bp, synthetic construct
  source 1..21: mol_type = other DNA; mol_type = other DNA
tgggtgaaaagtcaacaatgt

SEQ ID NO: 31824 - DNA, 21 bp, synthetic construct
  source 1..21: mol_type = other DNA; mol_type = other DNA
ttcagccggatgaacatcaat

SEQ ID NO: 31825 - DNA, 21 bp, synthetic construct
  source 1..21: mol_type = other DNA; mol_type = other DNA
tgcaaaccaccacctttagca

SEQ ID NO: 31826 - DNA, 21 bp, synthetic construct
  source 1..21: mol_type = other DNA; mol_type = other DNA
tacacaagctcgaacggtgtc

SEQ ID NO: 31827 - DNA, 21 bp, synthetic construct
  source 1..21: mol_type = other DNA; mol_type = other DNA
cgcagcgaatttactagttat

SEQ ID NO: 31828 - DNA, 21 bp, synthetic construct
  source 1..21: mol_type = other DNA; mol_type = other DNA
tattcaaggcataacattaac

SEQ ID NO: 31829 - DNA, 21 bp, synthetic construct
  source 1..21: mol_type = other DNA; mol_type = other DNA
tttttcagcggcacccgagcc

SEQ ID NO: 31830 - DNA, 21 bp, synthetic construct
  source 1..21: mol_type = other DNA; mol_type = other DNA
tattcgcgctcgaatgccaac

SEQ ID NO: 31831 - DNA, 21 bp, synthetic construct
  source 1..21: mol_type = other DNA; mol_type = other DNA
tacagcaggcacaaccataat

SEQ ID NO: 31832 - DNA, 21 bp, synthetic construct
  source 1..21: mol_type = other DNA; mol_type = other DNA
tgtaaaccagttcagcccgaa

SEQ ID NO: 31833 - DNA, 21 bp, synthetic construct
  source 1..21: mol_type = other DNA; mol_type = other DNA
ccgtgcaggccgtgctcggag

SEQ ID NO: 31834 - DNA, 21 bp, synthetic construct
  source 1..21: mol_type = other DNA; mol_type = other DNA
tacttccaaggaagacacgag

SEQ ID NO: 31835 - DNA, 21 bp, synthetic construct
  source 1..21: mol_type = other DNA; mol_type = other DNA
tgtaagccgcgcccggaggcc

SEQ ID NO: 31836 - DNA, 21 bp, synthetic construct
  source 1..21: mol_type = other DNA; mol_type = other DNA
tattactctggcagaatagat

SEQ ID NO: 31837 - DNA, 21 bp, synthetic construct
  source 1..21: mol_type = other DNA; mol_type = other DNA
gggattgacgttgtcaggtgg

SEQ ID NO: 31838 - DNA, 21 bp, synthetic construct
  source 1..21: mol_type = other DNA; mol_type = other DNA
ggggaagtaaacgttcggtgg

SEQ ID NO: 31839 - DNA, 21 bp, synthetic construct
  source 1..21: mol_type = other DNA; mol_type = other DNA
tatgttcgcagtgggcccccg

SEQ ID NO: 31840 - DNA, 21 bp, synthetic construct
  source 1..21: mol_type = other DNA; mol_type = other DNA
tacagcagggcaggtttgaac

SEQ ID NO: 31841 - DNA, 21 bp, synthetic construct
  source 1..21: mol_type = other DNA; mol_type = other DNA
aatttaaacgggaaagcatgc

SEQ ID NO: 31842 - DNA, 21 bp, synthetic construct
  source 1..21: mol_type = other DNA; mol_type = other DNA
tatgccaagaatggatcgaac

SEQ ID NO: 31843 - DNA, 21 bp, synthetic construct
  source 1..21: mol_type = other DNA; mol_type = other DNA
tattggtccgcgattaacgag

SEQ ID NO: 31844 - DNA, 21 bp, synthetic construct
  source 1..21: mol_type = other DNA; mol_type = other DNA
ggatcaaacggtgtgaggtgg

SEQ ID NO: 31845 - DNA, 21 bp, synthetic construct
  source 1..21: mol_type = other DNA; mol_type = other DNA
tgcaaaattccaagtgcaggt

SEQ ID NO: 31846 - DNA, 21 bp, synthetic construct
  source 1..21: mol_type = other DNA; mol_type = other DNA
acacgctggggagatcccgca

SEQ ID NO: 31847 - DNA, 21 bp, synthetic construct
  source 1..21: mol_type = other DNA; mol_type = other DNA
tgtcgtagcgaagtcgttaag

SEQ ID NO: 31848 - DNA, 21 bp, synthetic construct
  source 1..21: mol_type = other DNA; mol_type = other DNA
tgcaaaccgagggagggaact

SEQ ID NO: 31849 - DNA, 21 bp, synthetic construct
  source 1..21: mol_type = other DNA; mol_type = other DNA
tattggtcgggtacacgcgaa

SEQ ID NO: 31850 - DNA, 21 bp, synthetic construct
  source 1..21: mol_type = other DNA; mol_type = other DNA
tgtaagccctcaccactgagc

SEQ ID NO: 31851 - DNA, 21 bp, synthetic construct
  source 1..21: mol_type = other DNA; mol_type = other DNA
tactggcatggtaaaatagac

SEQ ID NO: 31852 - DNA, 21 bp, synthetic construct
  source 1..21: mol_type = other DNA; mol_type = other DNA
ttttttacgggtacggtggat

SEQ ID NO: 31853 - DNA, 21 bp, synthetic construct
  source 1..21: mol_type = other DNA; mol_type = other DNA
tacagcagagcgggcgttaac

SEQ ID NO: 31854 - DNA, 21 bp, synthetic construct
  source 1..21: mol_type = other DNA; mol_type = other DNA
agtggatcgacgaatggggta

SEQ ID NO: 31855 - DNA, 21 bp, synthetic construct
  source 1..21: mol_type = other DNA; mol_type = other DNA
atgtgggatgggacttatgct

SEQ ID NO: 31856 - DNA, 21 bp, synthetic construct
  source 1..21: mol_type = other DNA; mol_type = other DNA
tacttcagtggattgcacgca

SEQ ID NO: 31857 - DNA, 21 bp, synthetic construct
  source 1..21: mol_type = other DNA; mol_type = other DNA
tattttagcggtcaacaatca

SEQ ID NO: 31858 - DNA, 21 bp, synthetic construct
  source 1..21: mol_type = other DNA; mol_type = other DNA
tactcgcgtcttgatagttat

SEQ ID NO: 31859 - DNA, 21 bp, synthetic construct
  source 1..21: mol_type = other DNA; mol_type = other DNA
tattggtcgggaaccgccgcc

SEQ ID NO: 31860 - DNA, 21 bp, synthetic construct
  source 1..21: mol_type = other DNA; mol_type = other DNA
tattttcagggtcgccatgaa

SEQ ID NO: 31861 - DNA, 21 bp, synthetic construct
  source 1..21: mol_type = other DNA; mol_type = other DNA
tattggcacgggaagattgat

SEQ ID NO: 31862 - DNA, 21 bp, synthetic construct
  source 1..21: mol_type = other DNA; mol_type = other DNA
tatgcacgcataggaacaaat

SEQ ID NO: 31863 - DNA, 21 bp, synthetic construct
  source 1..21: mol_type = other DNA; mol_type = other DNA
tatttcagtcgcattcaagag

SEQ ID NO: 31864 - DNA, 21 bp, synthetic construct
  source 1..21: mol_type = other DNA; mol_type = other DNA
tattcgaagacgggggagaat

SEQ ID NO: 31865 - DNA, 21 bp, synthetic construct
  source 1..21: mol_type = other DNA; mol_type = other DNA
tactggagtggtctaaaagat

SEQ ID NO: 31866 - DNA, 21 bp, synthetic construct
  source 1..21: mol_type = other DNA; mol_type = other DNA
tactcgcggatgaactttaac

SEQ ID NO: 31867 - DNA, 21 bp, synthetic construct
  source 1..21: mol_type = other DNA; mol_type = other DNA
tactggaccggacggcaagag

SEQ ID NO: 31868 - DNA, 21 bp, synthetic construct
  source 1..21: mol_type = other DNA; mol_type = other DNA
tatgcgagggccggtttcaat

SEQ ID NO: 31869 - DNA, 21 bp, synthetic construct
  source 1..21: mol_type = other DNA; mol_type = other DNA
acgacagattatgtgatgtac

SEQ ID NO: 31870 - DNA, 21 bp, synthetic construct
  source 1..21: mol_type = other DNA; mol_type = other DNA
tatcacaggctaggtgacact

SEQ ID NO: 31871 - DNA, 21 bp, synthetic construct
  source 1..21: mol_type = other DNA; mol_type = other DNA
tacagtcgcctgaattacaat

SEQ ID NO: 31872 - DNA, 21 bp, synthetic construct
  source 1..21: mol_type = other DNA; mol_type = other DNA
gggatggaacatgtcaggtgg

SEQ ID NO: 31873 - DNA, 21 bp, synthetic construct
  source 1..21: mol_type = other DNA; mol_type = other DNA
tattttcaaggcaaaatatcc

SEQ ID NO: 31874 - DNA, 21 bp, synthetic construct
  source 1..21: mol_type = other DNA; mol_type = other DNA
tacagtgggcagggctgtgtc

SEQ ID NO: 31875 - DNA, 21 bp, synthetic construct
  source 1..21: mol_type = other DNA; mol_type = other DNA
tgtcaaaaggaaaagatggag

SEQ ID NO: 31876 - DNA, 21 bp, synthetic construct
  source 1..21: mol_type = other DNA; mol_type = other DNA
tacagtcgcttgagccaggat

SEQ ID NO: 31877 - DNA, 21 bp, synthetic construct
  source 1..21: mol_type = other DNA; mol_type = other DNA
tacgcccgcacgaacgaaaac

SEQ ID NO: 31878 - DNA, 21 bp, synthetic construct
  source 1..21: mol_type = other DNA; mol_type = other DNA
aaggatgattacatgtattat

SEQ ID NO: 31879 - DNA, 21 bp, synthetic construct
  source 1..21: mol_type = other DNA; mol_type = other DNA
tattcacggcacaatgaaaat

SEQ ID NO: 31880 - DNA, 21 bp, synthetic construct
  source 1..21: mol_type = other DNA; mol_type = other DNA
tacgcgaggaacggctttaat

SEQ ID NO: 31881 - DNA, 21 bp, synthetic construct
  source 1..21: mol_type = other DNA; mol_type = other DNA
tattggactggggtaggagcc

SEQ ID NO: 31882 - DNA, 21 bp, synthetic construct
  source 1..21: mol_type = other DNA; mol_type = other DNA
tattacagtggggtaacagct

SEQ ID NO: 31883 - DNA, 21 bp, synthetic construct
  source 1..21: mol_type = other DNA; mol_type = other DNA
tgcggccgtggggcgggaata

SEQ ID NO: 31884 - DNA, 21 bp, synthetic construct
  source 1..21: mol_type = other DNA; mol_type = other DNA
agggacgaatttaacatatac

SEQ ID NO: 31885 - DNA, 21 bp, synthetic construct
  source 1..21: mol_type = other DNA; mol_type = other DNA
cataatagcagcaatggtgtt

SEQ ID NO: 31886 - DNA, 21 bp, synthetic construct
  source 1..21: mol_type = other DNA; mol_type = other DNA
tatgcaaaggctggttggaat

SEQ ID NO: 31887 - DNA, 21 bp, synthetic construct
  source 1..21: mol_type = other DNA; mol_type = other DNA
tattctagactagaccccgtc

SEQ ID NO: 31888 - DNA, 21 bp, synthetic construct
  source 1..21: mol_type = other DNA; mol_type = other DNA
tatgcccgtgctggttataat

SEQ ID NO: 31889 - DNA, 21 bp, synthetic construct
  source 1..21: mol_type = other DNA; mol_type = other DNA
tgcaattatcccatgacagcg

SEQ ID NO: 31890 - DNA, 21 bp, synthetic construct
  source 1..21: mol_type = other DNA; mol_type = other DNA
tattggggcggtgttgcggcc

SEQ ID NO: 31891 - DNA, 21 bp, synthetic construct
  source 1..21: mol_type = other DNA; mol_type = other DNA
ggtttcgagacagtgagatgg

SEQ ID NO: 31892 - DNA, 21 bp, synthetic construct
  source 1..21: mol_type = other DNA; mol_type = other DNA
atatcgagctccaatggagtc

SEQ ID NO: 31893 - DNA, 21 bp, synthetic construct
  source 1..21: mol_type = other DNA; mol_type = other DNA
gtggaagagggctggtcttgg

SEQ ID NO: 31894 - DNA, 21 bp, synthetic construct
  source 1..21: mol_type = other DNA; mol_type = other DNA
tactctcgttataatgacaac

SEQ ID NO: 31895 - DNA, 21 bp, synthetic construct
  source 1..21: mol_type = other DNA; mol_type = other DNA
ttaatgggcggcggtacttgg

SEQ ID NO: 31896 - DNA, 21 bp, synthetic construct
  source 1..21: mol_type = other DNA; mol_type = other DNA
tacagtaaacaaggtagcaac

SEQ ID NO: 31897 - DNA, 21 bp, synthetic construct
  source 1..21: mol_type = other DNA; mol_type = other DNA
tggaccgatggtacgcgttat

SEQ ID NO: 31898 - DNA, 21 bp, synthetic construct
  source 1..21: mol_type = other DNA; mol_type = other DNA
actagagacggatataatgcg

SEQ ID NO: 31899 - DNA, 21 bp, synthetic construct
  source 1..21: mol_type = other DNA; mol_type = other DNA
agagaactcacttgcccacga

SEQ ID NO: 31900 - DNA, 21 bp, synthetic construct
  source 1..21: mol_type = other DNA; mol_type = other DNA
ccaatgcaagatcgcagctgg

SEQ ID NO: 31901 - DNA, 21 bp, synthetic construct
  source 1..21: mol_type = other DNA; mol_type = other DNA
tgtaaaccacgtagcgcggaa

SEQ ID NO: 31902 - DNA, 21 bp, synthetic construct
  source 1..21: mol_type = other DNA; mol_type = other DNA
tgtaagcccaggtctacggag

SEQ ID NO: 31903 - DNA, 21 bp, synthetic construct
  source 1..21: mol_type = other DNA; mol_type = other DNA
tactggcacggggtgcccgaa

SEQ ID NO: 31904 - DNA, 21 bp, synthetic construct
  source 1..21: mol_type = other DNA; mol_type = other DNA
tattttagtggctatacaagt

SEQ ID NO: 31905 - DNA, 21 bp, synthetic construct
  source 1..21: mol_type = other DNA; mol_type = other DNA
acatggagcgacaacggagtt

SEQ ID NO: 31906 - DNA, 21 bp, synthetic construct
  source 1..21: mol_type = other DNA; mol_type = other DNA
tattacactggcatggtcaac

SEQ ID NO: 31907 - DNA, 21 bp, synthetic construct
  source 1..21: mol_type = other DNA; mol_type = other DNA
tacttcaccgggagcgtagat

SEQ ID NO: 31908 - DNA, 21 bp, synthetic construct
  source 1..21: mol_type = other DNA; mol_type = other DNA
ccacattcgactaacggggtt

SEQ ID NO: 31909 - DNA, 21 bp, synthetic construct
  source 1..21: mol_type = other DNA; mol_type = other DNA
ttcttcagtgggatacaggaa

SEQ ID NO: 31910 - DNA, 21 bp, synthetic construct
  source 1..21: mol_type = other DNA; mol_type = other DNA
tattctagagtgggccataac

SEQ ID NO: 31911 - DNA, 21 bp, synthetic construct
  source 1..21: mol_type = other DNA; mol_type = other DNA
tacgtgaagtcgtccaacatt

SEQ ID NO: 31912 - DNA, 21 bp, synthetic construct
  source 1..21: mol_type = other DNA; mol_type = other DNA
aagtgtggcaagcaggaaggt

SEQ ID NO: 31913 - DNA, 21 bp, synthetic construct
  source 1..21: mol_type = other DNA; mol_type = other DNA
tttttttcaggccagcgtgac

SEQ ID NO: 31914 - DNA, 21 bp, synthetic construct
  source 1..21: mol_type = other DNA; mol_type = other DNA
taccacagggctggactagac

SEQ ID NO: 31915 - DNA, 21 bp, synthetic construct
  source 1..21: mol_type = other DNA; mol_type = other DNA
ttctcgaagatttgcaaggaa

SEQ ID NO: 31916 - DNA, 21 bp, synthetic construct
  source 1..21: mol_type = other DNA; mol_type = other DNA
gacatgcggtccccgatgtgg

SEQ ID NO: 31917 - DNA, 21 bp, synthetic construct
  source 1..21: mol_type = other DNA; mol_type = other DNA
aatatgggtgatcggaagtgg

SEQ ID NO: 31918 - DNA, 21 bp, synthetic construct
  source 1..21: mol_type = other DNA; mol_type = other DNA
tgtgcaaacgattacagggag

SEQ ID NO: 31919 - DNA, 21 bp, synthetic construct
  source 1..21: mol_type = other DNA; mol_type = other DNA
cttgcgcgcggcggctttgat

SEQ ID NO: 31920 - DNA, 21 bp, synthetic construct
  source 1..21: mol_type = other DNA; mol_type = other DNA
tgcggcgagaaatgttgtcct

SEQ ID NO: 31921 - DNA, 21 bp, synthetic construct
  source 1..21: mol_type = other DNA; mol_type = other DNA
agggagtataatgtttaccct

SEQ ID NO: 31922 - DNA, 21 bp, synthetic construct
  source 1..21: mol_type = other DNA; mol_type = other DNA
tgccgcgaaggaacctcagcc

SEQ ID NO: 31923 - DNA, 21 bp, synthetic construct
  source 1..21: mol_type = other DNA; mol_type = other DNA
aggggtgaatacatgtatccc

SEQ ID NO: 31924 - DNA, 21 bp, synthetic construct
  source 1..21: mol_type = other DNA; mol_type = other DNA
tattctagggcaaacaataac

SEQ ID NO: 31925 - DNA, 21 bp, synthetic construct
  source 1..21: mol_type = other DNA; mol_type = other DNA
ttacataaaacaacccataat

SEQ ID NO: 31926 - DNA, 21 bp, synthetic construct
  source 1..21: mol_type = other DNA; mol_type = other DNA
atacttaaatgcacgaacaat

SEQ ID NO: 31927 - DNA, 21 bp, synthetic construct
  source 1..21: mol_type = other DNA; mol_type = other DNA
gttatgtcttctagaacatgg

SEQ ID NO: 31928 - DNA, 21 bp, synthetic construct
  source 1..21: mol_type = other DNA; mol_type = other DNA
tgttccacaaattggaaatcc

SEQ ID NO: 31929 - DNA, 21 bp, synthetic construct
  source 1..21: mol_type = other DNA; mol_type = other DNA
ggggggggtgtagtacggtac

SEQ ID NO: 31930 - DNA, 21 bp, synthetic construct
  source 1..21: mol_type = other DNA; mol_type = other DNA
atgccttgcagtaaaactcca

SEQ ID NO: 31931 - DNA, 21 bp, synthetic construct
  source 1..21: mol_type = other DNA; mol_type = other DNA
tttaaggagtgcagtacaggg

SEQ ID NO: 31932 - DNA, 21 bp, synthetic construct
  source 1..21: mol_type = other DNA; mol_type = other DNA
taccacaaaaatatgccaaat

SEQ ID NO: 31933 - DNA, 21 bp, synthetic construct
  source 1..21: mol_type = other DNA; mol_type = other DNA
tgcaagcctggaacttgggaa

SEQ ID NO: 31934 - DNA, 21 bp, synthetic construct
  source 1..21: mol_type = other DNA; mol_type = other DNA
attccaaaaggtccctgtgcg

SEQ ID NO: 31935 - DNA, 21 bp, synthetic construct
  source 1..21: mol_type = other DNA; mol_type = other DNA
gagcctcagtcgaggcactgg

SEQ ID NO: 31936 - DNA, 21 bp, synthetic construct
  source 1..21: mol_type = other DNA; mol_type = other DNA
tattcccgcagtgggcagaac

SEQ ID NO: 31937 - DNA, 21 bp, synthetic construct
  source 1..21: mol_type = other DNA; mol_type = other DNA
tacgcgcgtgtgggcatgaac

SEQ ID NO: 31938 - DNA, 21 bp, synthetic construct
  source 1..21: mol_type = other DNA; mol_type = other DNA
cgagaaggcacgagttactgg

SEQ ID NO: 31939 - DNA, 21 bp, synthetic construct
  source 1..21: mol_type = other DNA; mol_type = other DNA
tggttctcaggtcgcgtcgaa

SEQ ID NO: 31940 - DNA, 21 bp, synthetic construct
  source 1..21: mol_type = other DNA; mol_type = other DNA
tgtaaaccacctgtagatgct

SEQ ID NO: 31941 - DNA, 21 bp, synthetic construct
  source 1..21: mol_type = other DNA; mol_type = other DNA
agaacacctacaaccttccct

SEQ ID NO: 31942 - DNA, 21 bp, synthetic construct
  source 1..21: mol_type = other DNA; mol_type = other DNA
tatgccagagtcggtatgaat

SEQ ID NO: 31943 - DNA, 21 bp, synthetic construct
  source 1..21: mol_type = other DNA; mol_type = other DNA
tatgccaagggaggtaacaat

SEQ ID NO: 31944 - DNA, 21 bp, synthetic construct
  source 1..21: mol_type = other DNA; mol_type = other DNA
tacagcaagcaaaattggaat

SEQ ID NO: 31945 - DNA, 21 bp, synthetic construct
  source 1..21: mol_type = other DNA; mol_type = other DNA
caaagcggaatgttacgttgt

SEQ ID NO: 31946 - DNA, 21 bp, synthetic construct
  source 1..21: mol_type = other DNA; mol_type = other DNA
tgcatcaaacctatgactgcg

SEQ ID NO: 31947 - DNA, 21 bp, synthetic construct
  source 1..21: mol_type = other DNA; mol_type = other DNA
gttagtactcactgcgtagcg

SEQ ID NO: 31948 - DNA, 21 bp, synthetic construct
  source 1..21: mol_type = other DNA; mol_type = other DNA
ttctgggcaggtgtaaaagat

SEQ ID NO: 31949 - DNA, 21 bp, synthetic construct
  source 1..21: mol_type = other DNA; mol_type = other DNA
tgtaaaccggggacgtgggag

SEQ ID NO: 31950 - DNA, 21 bp, synthetic construct
  source 1..21: mol_type = other DNA; mol_type = other DNA
ataatgagtagcaggggatgg

SEQ ID NO: 31951 - DNA, 21 bp, synthetic construct
  source 1..21: mol_type = other DNA; mol_type = other DNA
taccatcgtcaaaatccgctc

SEQ ID NO: 31952 - DNA, 21 bp, synthetic construct
  source 1..21: mol_type = other DNA; mol_type = other DNA
gtgacttccacgatgggccga

SEQ ID NO: 31953 - DNA, 21 bp, synthetic construct
  source 1..21: mol_type = other DNA; mol_type = other DNA
tacgctaaaaacggtcagaac

SEQ ID NO: 31954 - DNA, 21 bp, synthetic construct
  source 1..21: mol_type = other DNA; mol_type = other DNA
tacgctagacaaggtactaac

SEQ ID NO: 31955 - DNA, 21 bp, synthetic construct
  source 1..21: mol_type = other DNA; mol_type = other DNA
tacgttaggtcaggtccaatg

SEQ ID NO: 31956 - DNA, 21 bp, synthetic construct
  source 1..21: mol_type = other DNA; mol_type = other DNA
tattacaccggccgtactgat

SEQ ID NO: 31957 - DNA, 21 bp, synthetic construct
  source 1..21: mol_type = other DNA; mol_type = other DNA
tatttctccgggatgatggag

SEQ ID NO: 31958 - DNA, 21 bp, synthetic construct
  source 1..21: mol_type = other DNA; mol_type = other DNA
ttctttacgggtaggctcgat

SEQ ID NO: 31959 - DNA, 21 bp, synthetic construct
  source 1..21: mol_type = other DNA; mol_type = other DNA
ccggttgatacatgcagaccc

SEQ ID NO: 31960 - DNA, 21 bp, synthetic construct
  source 1..21: mol_type = other DNA; mol_type = other DNA
tgcgatgggtcacgaaaagca

SEQ ID NO: 31961 - DNA, 21 bp, synthetic construct
  source 1..21: mol_type = other DNA; mol_type = other DNA
tctttgtcggaccgaacctgg

SEQ ID NO: 31962 - DNA, 21 bp, synthetic construct
  source 1..21: mol_type = other DNA; mol_type = other DNA
ctacaccggctgtgcccggac

SEQ ID NO: 31963 - DNA, 21 bp, synthetic construct
  source 1..21: mol_type = other DNA; mol_type = other DNA
ctcaaggatggcacaccagct

SEQ ID NO: 31964 - DNA, 21 bp, synthetic construct
  source 1..21: mol_type = other DNA; mol_type = other DNA
agacgggatggtacgcctgcc

SEQ ID NO: 31965 - DNA, 21 bp, synthetic construct
  source 1..21: mol_type = other DNA; mol_type = other DNA
tacttccaggggcgcctagaa

SEQ ID NO: 31966 - DNA, 21 bp, synthetic construct
  source 1..21: mol_type = other DNA; mol_type = other DNA
tgtattatgaagaagctagaa

SEQ ID NO: 31967 - DNA, 21 bp, synthetic construct
  source 1..21: mol_type = other DNA; mol_type = other DNA
ggatcagggacaagtgcttgg

SEQ ID NO: 31968 - DNA, 21 bp, synthetic construct
  source 1..21: mol_type = other DNA; mol_type = other DNA
cttaagggctcatgtgaacag

SEQ ID NO: 31969 - DNA, 21 bp, synthetic construct
  source 1..21: mol_type = other DNA; mol_type = other DNA
tgtaaagcgttgtcacaagac

SEQ ID NO: 31970 - DNA, 21 bp, synthetic construct
  source 1..21: mol_type = other DNA; mol_type = other DNA
tgtacggtgaagaccggccat

SEQ ID NO: 31971 - DNA, 21 bp, synthetic construct
  source 1..21: mol_type = other DNA; mol_type = other DNA
tgcaagctcaatggcccggat

SEQ ID NO: 31972 - DNA, 21 bp, synthetic construct
  source 1..21: mol_type = other DNA; mol_type = other DNA
tgcaaagctgttagtcgcgat

SEQ ID NO: 31973 - DNA, 21 bp, synthetic construct
  source 1..21: mol_type = other DNA; mol_type = other DNA
tatgcaaggatgggtatgaac

SEQ ID NO: 31974 - DNA, 21 bp, synthetic construct
  source 1..21: mol_type = other DNA; mol_type = other DNA
tactggagtggaatgcccgag

SEQ ID NO: 31975 - DNA, 21 bp, synthetic construct
  source 1..21: mol_type = other DNA; mol_type = other DNA
tacgccagaatgggatacaac

SEQ ID NO: 31976 - DNA, 21 bp, synthetic construct
  source 1..21: mol_type = other DNA; mol_type = other DNA
tactcgaaaataaattttaac

SEQ ID NO: 31977 - DNA, 21 bp, synthetic construct
  source 1..21: mol_type = other DNA; mol_type = other DNA
ttatcaagggttgccttcgat

SEQ ID NO: 31978 - DNA, 21 bp, synthetic construct
  source 1..21: mol_type = other DNA; mol_type = other DNA
actcgcgatggctgcatggca

SEQ ID NO: 31979 - DNA, 21 bp, synthetic construct
  source 1..21: mol_type = other DNA; mol_type = other DNA
tatagtcgggcaggctacaac

SEQ ID NO: 31980 - DNA, 21 bp, synthetic construct
  source 1..21: mol_type = other DNA; mol_type = other DNA
cattacagtacgaatggagtg

SEQ ID NO: 31981 - DNA, 21 bp, synthetic construct
  source 1..21: mol_type = other DNA; mol_type = other DNA
tactacacaggaatccaagag

SEQ ID NO: 31982 - DNA, 21 bp, synthetic construct
  source 1..21: mol_type = other DNA; mol_type = other DNA
tgtaagccaaccatggtgcaa

SEQ ID NO: 31983 - DNA, 21 bp, synthetic construct
  source 1..21: mol_type = other DNA; mol_type = other DNA
tatttcagcggcacgatagta

SEQ ID NO: 31984 - DNA, 21 bp, synthetic construct
  source 1..21: mol_type = other DNA; mol_type = other DNA
tatttttcgggcaaaacggtt

SEQ ID NO: 31985 - DNA, 21 bp, synthetic construct
  source 1..21: mol_type = other DNA; mol_type = other DNA
tactatacaggggttcaagcg

SEQ ID NO: 31986 - DNA, 21 bp, synthetic construct
  source 1..21: mol_type = other DNA; mol_type = other DNA
tactttagtggagtacgcggg

SEQ ID NO: 31987 - DNA, 21 bp, synthetic construct
  source 1..21: mol_type = other DNA; mol_type = other DNA
tgtaataagcccatgaccgag

SEQ ID NO: 31988 - DNA, 21 bp, synthetic construct
  source 1..21: mol_type = other DNA; mol_type = other DNA
tactcgcgtcacaatgataat

SEQ ID NO: 31989 - DNA, 21 bp, synthetic construct
  source 1..21: mol_type = other DNA; mol_type = other DNA
tattggcagggagtggtggac

SEQ ID NO: 31990 - DNA, 21 bp, synthetic construct
  source 1..21: mol_type = other DNA; mol_type = other DNA
tacagcagggtaaatagtaat

SEQ ID NO: 31991 - DNA, 21 bp, synthetic construct
  source 1..21: mol_type = other DNA; mol_type = other DNA
ttcgtacgatcagatattaag

SEQ ID NO: 31992 - DNA, 21 bp, synthetic construct
  source 1..21: mol_type = other DNA; mol_type = other DNA
tgctataaacctatgaccgcg

SEQ ID NO: 31993 - DNA, 21 bp, synthetic construct
  source 1..21: mol_type = other DNA; mol_type = other DNA
acgcaaatctgcccggatagg

SEQ ID NO: 31994 - DNA, 21 bp, synthetic construct
  source 1..21: mol_type = other DNA; mol_type = other DNA
tttaatagcacaaatgggatc

SEQ ID NO: 31995 - DNA, 21 bp, synthetic construct
  source 1..21: mol_type = other DNA; mol_type = other DNA
tatttcaagactcaatgtgat

SEQ ID NO: 31996 - DNA, 21 bp, synthetic construct
  source 1..21: mol_type = other DNA; mol_type = other DNA
tacttcagtggccgacacgac

SEQ ID NO: 31997 - DNA, 21 bp, synthetic construct
  source 1..21: mol_type = other DNA; mol_type = other DNA
tactcgaaaatcggaaaggat

SEQ ID NO: 31998 - DNA, 21 bp, synthetic construct
  source 1..21: mol_type = other DNA; mol_type = other DNA
ttcagccgagccaacgtcaac

SEQ ID NO: 31999 - DNA, 21 bp, synthetic construct
  source 1..21: mol_type = other DNA; mol_type = other DNA
tactggactggaaaacaggat

SEQ ID NO: 32000 - DNA, 21 bp, synthetic construct
  source 1..21: mol_type = other DNA; mol_type = other DNA
ttttctagagttaacttcaat

SEQ ID NO: 32001 - DNA, 21 bp, synthetic construct
  source 1..21: mol_type = other DNA; mol_type = other DNA
tgtaaccagccaatgactgcg

SEQ ID NO: 32002 - DNA, 21 bp, synthetic construct
  source 1..21: mol_type = other DNA; mol_type = other DNA
aggttagaatctgtacaatgg

SEQ ID NO: 32003 - DNA, 21 bp, synthetic construct
  source 1..21: mol_type = other DNA
tgtaataaaccgatgacaacg

SEQ ID NO: 32004 - DNA, 21 bp, synthetic construct
  source 1..21: mol_type = other DNA; mol_type = other DNA
gctcctcccgaagtcagatgg

SEQ ID NO: 32005 - DNA, 21 bp, synthetic construct
  source 1..21: mol_type = other DNA; mol_type = other DNA
tatttcaccaatgtgaaagaa

SEQ ID NO: 32006 - DNA, 21 bp, synthetic construct
  source 1..21: mol_type = other DNA; mol_type = other DNA
tatacccgtttgaatcccatg

SEQ ID NO: 32007 - DNA, 21 bp, synthetic construct
  source 1..21: mol_type = other DNA; mol_type = other DNA
tacttccagggtaagattagt

SEQ ID NO: 32008 - DNA, 21 bp, synthetic construct
  source 1..21: mol_type = other DNA; mol_type = other DNA
gatatgcaagataggtcttgg

SEQ ID NO: 32009 - DNA, 21 bp, synthetic construct
  source 1..21: mol_type = other DNA; mol_type = other DNA
ccacttaaaagcagtctatgg

SEQ ID NO: 32010 - DNA, 21 bp, synthetic construct
  source 1..21: mol_type = other DNA; mol_type = other DNA
ttcgcaaggagcggttataac

SEQ ID NO: 32011 - DNA, 21 bp, synthetic construct
  source 1..21: mol_type = other DNA; mol_type = other DNA
gcgggcatggatcggggttgg

SEQ ID NO: 32012 - DNA, 21 bp, synthetic construct
  source 1..21: mol_type = other DNA; mol_type = other DNA
tacgcggatagtaagacttgc

SEQ ID NO: 32013 - DNA, 21 bp, synthetic construct
  source 1..21: mol_type = other DNA; mol_type = other DNA
gacatgggcgcaagtagctgg

SEQ ID NO: 32014 - DNA, 21 bp, synthetic construct
  source 1..21: mol_type = other DNA; mol_type = other DNA
tgtggtaagcgagacgcggac

SEQ ID NO: 32015 - DNA, 21 bp, synthetic construct
  source 1..21: mol_type = other DNA; mol_type = other DNA
gacctcaaatctgcatcatgg

SEQ ID NO: 32016 - DNA, 21 bp, synthetic construct
  source 1..21: mol_type = other DNA; mol_type = other DNA
tgccccaagaatcaacgtgag

SEQ ID NO: 32017 - DNA, 21 bp, synthetic construct
  source 1..21: mol_type = other DNA; mol_type = other DNA
ggtgacgggaactcacgctgg

SEQ ID NO: 32018 - DNA, 21 bp, synthetic construct
  source 1..21: mol_type = other DNA; mol_type = other DNA
tcattagaaagcagggattgg

SEQ ID NO: 32019 - DNA, 21 bp, synthetic construct
  source 1..21: mol_type = other DNA; mol_type = other DNA
cgagacgagtttatgtctttt

SEQ ID NO: 32020 - DNA, 21 bp, synthetic construct
  source 1..21: mol_type = other DNA; mol_type = other DNA
tatcatcgcacgggcaacaat

SEQ ID NO: 32021 - DNA, 21 bp, synthetic construct
  source 1..21: mol_type = other DNA; mol_type = other DNA
tgccctccgaaaggtcccagt

SEQ ID NO: 32022 - DNA, 21 bp, synthetic construct
  source 1..21: mol_type = other DNA; mol_type = other DNA
ttcttctcaggacaagtagag

SEQ ID NO: 32023 - DNA, 21 bp, synthetic construct
  source 1..21: mol_type = other DNA; mol_type = other DNA
atgactggtacggattgctta

SEQ ID NO: 32024 - DNA, 21 bp, synthetic construct
  source 1..21: mol_type = other DNA; mol_type = other DNA
tactttcagggacaacatgaa

SEQ ID NO: 32025 - DNA, 21 bp, synthetic construct
  source 1..21: mol_type = other DNA; mol_type = other DNA
ggtatcttgacccggggaagc

SEQ ID NO: 32026 - DNA, 21 bp, synthetic construct
  source 1..21: mol_type = other DNA; mol_type = other DNA
tgcgcaccataccttcccgaa

SEQ ID NO: 32027 - DNA, 21 bp, synthetic construct
  source 1..21: mol_type = other DNA; mol_type = other DNA
tgtggattaggatcggaagct

SEQ ID NO: 32028 - DNA, 21 bp, synthetic construct
  source 1..21: mol_type = other DNA; mol_type = other DNA
tgcaggcaccccgttacagcc

SEQ ID NO: 32029 - DNA, 21 bp, synthetic construct
  source 1..21: mol_type = other DNA; mol_type = other DNA
tactggactggcacgctggag

SEQ ID NO: 32030 - DNA, 21 bp, synthetic construct
  source 1..21: mol_type = other DNA; mol_type = other DNA
tgcaagatggatggtactgga

SEQ ID NO: 32031 - DNA, 21 bp, synthetic construct
  source 1..21: mol_type = other DNA; mol_type = other DNA
tttcatagattaagtcccggc

SEQ ID NO: 32032 - DNA, 21 bp, synthetic construct
  source 1..21: mol_type = other DNA; mol_type = other DNA
gaagagcctgggtgtaaggag

SEQ ID NO: 32033 - DNA, 21 bp, synthetic construct
  source 1..21: mol_type = other DNA; mol_type = other DNA
tacgactcaacaaatggagtg

SEQ ID NO: 32034 - DNA, 21 bp, synthetic construct
  source 1..21: mol_type = other DNA; mol_type = other DNA
tatttcactggggcaatggat

SEQ ID NO: 32035 - DNA, 21 bp, synthetic construct
  source 1..21: mol_type = other DNA; mol_type = other DNA
agagccctggatggctttgat

SEQ ID NO: 32036 - DNA, 21 bp, synthetic construct
  source 1..21: mol_type = other DNA; mol_type = other DNA
tggtttagcggaaaggtagaa

SEQ ID NO: 32037 - DNA, 21 bp, synthetic construct
  source 1..21: mol_type = other DNA; mol_type = other DNA
tattcaaagggcaactggaac

SEQ ID NO: 32038 - DNA, 21 bp, synthetic construct
  source 1..21: mol_type = other DNA; mol_type = other DNA
ggacgcgagcatgttaagtgg

SEQ ID NO: 32039 - DNA, 21 bp, synthetic construct
  source 1..21: mol_type = other DNA; mol_type = other DNA
tattataccggtcatcctaat

SEQ ID NO: 32040 - DNA, 21 bp, synthetic construct
  source 1..21: mol_type = other DNA; mol_type = other DNA
tattggagtggaacaagggag

SEQ ID NO: 32041 - DNA, 21 bp, synthetic construct
  source 1..21: mol_type = other DNA; mol_type = other DNA
agggagaatgaagtacgctgg

SEQ ID NO: 32042 - DNA, 21 bp, synthetic construct
  source 1..21: mol_type = other DNA; mol_type = other DNA
cgggatgctgaggtgtaccct

SEQ ID NO: 32043 - DNA, 21 bp, synthetic construct
  source 1..21: mol_type = other DNA; mol_type = other DNA
tactccagggccaacgtgaac

SEQ ID NO: 32044 - DNA, 21 bp, synthetic construct
  source 1..21: mol_type = other DNA; mol_type = other DNA
actccagattccgtaagatgg

SEQ ID NO: 32045 - DNA, 21 bp, synthetic construct
  source 1..21: mol_type = other DNA; mol_type = other DNA
aggggggggggcttgttcgtt

SEQ ID NO: 32046 - DNA, 21 bp, synthetic construct
  source 1..21: mol_type = other DNA; mol_type = other DNA
cactattcaaccaacggtgtt

SEQ ID NO: 32047 - DNA, 21 bp, synthetic construct
  source 1..21: mol_type = other DNA; mol_type = other DNA
tgccgcccgaggaccatcgaa

SEQ ID NO: 32048 - DNA, 21 bp, synthetic construct
  source 1..21: mol_type = other DNA; mol_type = other DNA
tgtacatctgcgacagggcat

SEQ ID NO: 32049 - DNA, 21 bp, synthetic construct
  source 1..21: mol_type = other DNA; mol_type = other DNA
tactggacgggacaagtagag

SEQ ID NO: 32050 - DNA, 21 bp, synthetic construct
  source 1..21: mol_type = other DNA; mol_type = other DNA
tattcaagaatgaacgataat

SEQ ID NO: 32051 - DNA, 21 bp, synthetic construct
  source 1..21: mol_type = other DNA; mol_type = other DNA
accatgtcagataggacgtgg

SEQ ID NO: 32052 - DNA, 21 bp, synthetic construct
  source 1..21: mol_type = other DNA; mol_type = other DNA
tactggacgggcaaacacgaa

SEQ ID NO: 32053 - DNA, 21 bp, synthetic construct
  source 1..21: mol_type = other DNA; mol_type = other DNA
aatatggcttcaagtgggtgg

SEQ ID NO: 32054 - DNA, 21 bp, synthetic construct
  source 1..21: mol_type = other DNA; mol_type = other DNA
tactcccgaatgggctttaat

SEQ ID NO: 32055 - DNA, 21 bp, synthetic construct
  source 1..21: mol_type = other DNA; mol_type = other DNA
tatttccatggggttcaggat

SEQ ID NO: 32056 - DNA, 21 bp, synthetic construct
  source 1..21: mol_type = other DNA; mol_type = other DNA
tactttcaggggcgactggaa

SEQ ID NO: 32057 - DNA, 21 bp, synthetic construct
  source 1..21: mol_type = other DNA; mol_type = other DNA
atgagtgagtttaagtcatgg

SEQ ID NO: 32058 - DNA, 21 bp, synthetic construct
  source 1..21: mol_type = other DNA; mol_type = other DNA
cccccggtgattcaatgtagc

SEQ ID NO: 32059 - DNA, 21 bp, synthetic construct
  source 1..21: mol_type = other DNA; mol_type = other DNA
tatacatcaaccaatggaatc

SEQ ID NO: 32060 - DNA, 21 bp, synthetic construct
  source 1..21: mol_type = other DNA; mol_type = other DNA
aacgatgccacaagcaagtgg

SEQ ID NO: 32061 - DNA, 21 bp, synthetic construct
  source 1..21: mol_type = other DNA; mol_type = other DNA
atgccagacggcactgggcca

SEQ ID NO: 32062 - DNA, 21 bp, synthetic construct
  source 1..21: mol_type = other DNA; mol_type = other DNA
tatgttagatttgataataat

SEQ ID NO: 32063 - DNA, 21 bp, synthetic construct
  source 1..21: mol_type = other DNA; mol_type = other DNA
tcagtatccactaacggagtg

SEQ ID NO: 32064 - DNA, 21 bp, synthetic construct
  source 1..21: mol_type = other DNA; mol_type = other DNA
taccataggcagaacccgctg

SEQ ID NO: 32065 - DNA, 21 bp, synthetic construct
  source 1..21: mol_type = other DNA; mol_type = other DNA
tgtaagcctcccagcggggat

SEQ ID NO: 32066 - DNA, 21 bp, synthetic construct
  source 1..21: mol_type = other DNA; mol_type = other DNA
tacttcagcgggaagccagaa

SEQ ID NO: 32067 - DNA, 21 bp, synthetic construct
  source 1..21: mol_type = other DNA; mol_type = other DNA
gtggcctctagtaacggcgta

SEQ ID NO: 32068 - DNA, 21 bp, synthetic construct
  source 1..21: mol_type = other DNA; mol_type = other DNA
tattttcacgggagacacgac

SEQ ID NO: 32069 - DNA, 21 bp, synthetic construct
  source 1..21: mol_type = other DNA; mol_type = other DNA
tactcacgtattaatatgaac

SEQ ID NO: 32070 - DNA, 21 bp, synthetic construct
  source 1..21: mol_type = other DNA; mol_type = other DNA
tacagttccactaatggggtc

SEQ ID NO: 32071 - DNA, 21 bp, synthetic construct
  source 1..21: mol_type = other DNA; mol_type = other DNA
agcatggaaagccacggctgg

SEQ ID NO: 32072 - DNA, 21 bp, synthetic construct
  source 1..21: mol_type = other DNA
agggactctactaacgggatt

SEQ ID NO: 32073 - DNA, 21 bp, synthetic construct
  source 1..21: mol_type = other DNA
gtgccggactatgtgaaatat

SEQ ID NO: 32074 - DNA, 21 bp, synthetic construct
  source 1..21: mol_type = other DNA
tatgctcggcaaggacaaaac

SEQ ID NO: 32075 - DNA, 21 bp, synthetic construct
  source 1..21: mol_type = other DNA
tgcggtcttaatccgtgcggg

SEQ ID NO: 32076 - DNA, 21 bp, synthetic construct
  source 1..21: mol_type = other DNA
ttcttaaaatcacagtcctat

SEQ ID NO: 32077 - DNA, 21 bp, synthetic construct
  source 1..21: mol_type = other DNA
agtaaatcgacaaatggtatc

SEQ ID NO: 32078 - DNA, 21 bp, synthetic construct
  source 1..21: mol_type = other DNA
tgcaagcctatggctcccgat

SEQ ID NO: 32079 - DNA, 21 bp, synthetic construct
  source 1..21: mol_type = other DNA
ctcgccaaaactagttgcaac

SEQ ID NO: 32080 - DNA, 21 bp, synthetic construct
  source 1..21: mol_type = other DNA
tgcactagtaaaacggaacac

SEQ ID NO: 32081 - DNA, 21 bp, synthetic construct
  source 1..21: mol_type = other DNA
tatgcccggaatgggtataac

SEQ ID NO: 32082 - DNA, 21 bp, synthetic construct
  source 1..21: mol_type = other DNA
tcggcccccacgtgcaaggga

SEQ ID NO: 32083 - DNA, 21 bp, synthetic construct
  source 1..21: mol_type = other DNA
tgtagagaaggaacttcatcg

SEQ ID NO: 32084 - DNA, 21 bp, synthetic construct
  source 1..21: mol_type = other DNA
ttttcaaaggcaggatacaat

SEQ ID NO: 32085 - DNA, 21 bp, synthetic construct
  source 1..21: mol_type = other DNA
tacgatccgggctgtaaggag

SEQ ID NO: 32086 - DNA, 21 bp, synthetic construct
  source 1..21: mol_type = other DNA
tgcaagcccccatttgtggct

SEQ ID NO: 32087 - DNA, 21 bp, synthetic construct
  source 1..21: mol_type = other DNA
ggaagtgagttcaagtcatgg

SEQ ID NO: 32088 - DNA, 21 bp, synthetic construct
  source 1..21: mol_type = other DNA; mol_type = other DNA
tattcaagaaacgggctgaac

SEQ ID NO: 32089 - DNA, 21 bp, synthetic construct
  source 1..21: mol_type = other DNA; mol_type = other DNA
ctccgaagcggctgcggcccg

SEQ ID NO: 32090 - DNA, 21 bp, synthetic construct
  source 1..21: mol_type = other DNA; mol_type = other DNA
tgcaaagaggatagtcgcatt

SEQ ID NO: 32091 - DNA, 21 bp, synthetic construct
  source 1..21: mol_type = other DNA; mol_type = other DNA
tactggacaggaaaacccgat

SEQ ID NO: 32092 - DNA, 21 bp, synthetic construct
  source 1..21: mol_type = other DNA; mol_type = other DNA
tgccgtgaaggaaccccacca

SEQ ID NO: 32093 - DNA, 21 bp, synthetic construct
  source 1..21: mol_type = other DNA; mol_type = other DNA
tgcaagcccggtatgggatct

SEQ ID NO: 32094 - DNA, 21 bp, synthetic construct
  source 1..21: mol_type = other DNA; mol_type = other DNA
tactcccgcatgagcgataat

SEQ ID NO: 32095 - DNA, 21 bp, synthetic construct
  source 1..21: mol_type = other DNA; mol_type = other DNA
tactcgaggcataatgcaaac

SEQ ID NO: 32096 - DNA, 21 bp, synthetic construct
  source 1..21: mol_type = other DNA; mol_type = other DNA
cgtacgtttgatagctttgaa

SEQ ID NO: 32097 - DNA, 21 bp, synthetic construct
  source 1..21: mol_type = other DNA; mol_type = other DNA
cgcgaaaacgaggtcaggtgg

SEQ ID NO: 32098 - DNA, 21 bp, synthetic construct
  source 1..21: mol_type = other DNA; mol_type = other DNA
tacttttctggtactgtgacc

SEQ ID NO: 32099 - DNA, 21 bp, synthetic construct
  source 1..21: mol_type = other DNA; mol_type = other DNA
aaagaagaacatgtccgttgg

SEQ ID NO: 32100 - DNA, 21 bp, synthetic construct
  source 1..21: mol_type = other DNA; mol_type = other DNA
tatgctaagggcggctttaac

SEQ ID NO: 32101 - DNA, 21 bp, synthetic construct
  source 1..21: mol_type = other DNA; mol_type = other DNA
tatagccgagttaacacgaac

SEQ ID NO: 32102 - DNA, 21 bp, synthetic construct
  source 1..21: mol_type = other DNA; mol_type = other DNA
aattcgtcgacgaatggggtt

SEQ ID NO: 32103 - DNA, 21 bp, synthetic construct
  source 1..21: mol_type = other DNA; mol_type = other DNA
tatagccgacagaaccccaac

SEQ ID NO: 32104 - DNA, 21 bp, synthetic construct
  source 1..21: mol_type = other DNA; mol_type = other DNA
tattccagaaacggtaataat

SEQ ID NO: 32105 - DNA, 21 bp, synthetic construct
  source 1..21: mol_type = other DNA; mol_type = other DNA
tgtaagcctcctcccacgcct

SEQ ID NO: 32106 - DNA, 21 bp, synthetic construct
  source 1..21: mol_type = other DNA; mol_type = other DNA
tacagtcgtggcaacgccaat

SEQ ID NO: 32107 - DNA, 21 bp, synthetic construct
  source 1..21: mol_type = other DNA; mol_type = other DNA
tatgttaggtctgggccagat

SEQ ID NO: 32108 - DNA, 21 bp, synthetic construct
  source 1..21: mol_type = other DNA; mol_type = other DNA
tatttcacaggggaaatggaa

SEQ ID NO: 32109 - DNA, 21 bp, synthetic construct
  source 1..21: mol_type = other DNA; mol_type = other DNA
tatgccagaaacggatataat

SEQ ID NO: 32110 - DNA, 21 bp, synthetic construct
  source 1..21: mol_type = other DNA; mol_type = other DNA
gttttgcagagtgccagctgg

SEQ ID NO: 32111 - DNA, 21 bp, synthetic construct
  source 1..21: mol_type = other DNA; mol_type = other DNA
tatagtcgcatgaatctcaat

SEQ ID NO: 32112 - DNA, 21 bp, synthetic construct
  source 1..21: mol_type = other DNA; mol_type = other DNA
ttatcaaaaatgaatcacaac

SEQ ID NO: 32113 - DNA, 21 bp, synthetic construct
  source 1..21: mol_type = other DNA; mol_type = other DNA
tatgcacgcgtaggatataat

SEQ ID NO: 32114 - DNA, 21 bp, synthetic construct
  source 1..21: mol_type = other DNA; mol_type = other DNA
tattattcagggcagcgagag

SEQ ID NO: 32115 - DNA, 21 bp, synthetic construct
  source 1..21: mol_type = other DNA; mol_type = other DNA
ggagataataataaggtgtgc

SEQ ID NO: 32116 - DNA, 21 bp, synthetic construct
  source 1..21: mol_type = other DNA; mol_type = other DNA
gtgaacgacgcgggcaaatgt

SEQ ID NO: 32117 - DNA, 21 bp, synthetic construct
  source 1..21: mol_type = other DNA; mol_type = other DNA
gatttagggagcgcttcttgg

SEQ ID NO: 32118 - DNA, 21 bp, synthetic construct
  source 1..21: mol_type = other DNA; mol_type = other DNA
ttttggacggggaaagtcgag

SEQ ID NO: 32119 - DNA, 21 bp, synthetic construct
  source 1..21: mol_type = other DNA; mol_type = other DNA
tatgcaagaagtaactacaat

SEQ ID NO: 32120 - DNA, 21 bp, synthetic construct
  source 1..21: mol_type = other DNA; mol_type = other DNA
tactatagcggtgtgcaagct

SEQ ID NO: 32121 - DNA, 21 bp, synthetic construct
  source 1..21: mol_type = other DNA; mol_type = other DNA
tacgtgcgaagccagcaatcg

SEQ ID NO: 32122 - DNA, 21 bp, synthetic construct
  source 1..21: mol_type = other DNA; mol_type = other DNA
tactacacaggccagaccgaa

SEQ ID NO: 32123 - DNA, 21 bp, synthetic construct
  source 1..21: mol_type = other DNA; mol_type = other DNA
aaaaacgactatgccacatgg

SEQ ID NO: 32124 - DNA, 21 bp, synthetic construct
  source 1..21: mol_type = other DNA; mol_type = other DNA
ggggatggacgatcacactgg

SEQ ID NO: 32125 - DNA, 21 bp, synthetic construct
  source 1..21: mol_type = other DNA; mol_type = other DNA
tacttcagcgggaagactgta

SEQ ID NO: 32126 - DNA, 21 bp, synthetic construct
  source 1..21: mol_type = other DNA; mol_type = other DNA
tgtaaacctgtgaagggggaa

SEQ ID NO: 32127 - DNA, 21 bp, synthetic construct
  source 1..21: mol_type = other DNA; mol_type = other DNA
tgtacaagcaagacctaccac

SEQ ID NO: 32128 - DNA, 21 bp, synthetic construct
  source 1..21: mol_type = other DNA; mol_type = other DNA
ccgatgtcagttagcaagtgg

SEQ ID NO: 32129 - DNA, 21 bp, synthetic construct
  source 1..21: mol_type = other DNA; mol_type = other DNA
ttggcgaaaacagcatggaat

SEQ ID NO: 32130 - DNA, 21 bp, synthetic construct
  source 1..21: mol_type = other DNA; mol_type = other DNA
atcatgttggacagaggatgg

SEQ ID NO: 32131 - DNA, 21 bp, synthetic construct
  source 1..21: mol_type = other DNA; mol_type = other DNA
tattacagtggtgtcagcgcg

SEQ ID NO: 32132 - DNA, 21 bp, synthetic construct
  source 1..21: mol_type = other DNA; mol_type = other DNA
tttacgagcagtaatggcgtt

SEQ ID NO: 32133 - DNA, 21 bp, synthetic construct
  source 1..21: mol_type = other DNA; mol_type = other DNA
atcccagggtgcatgtcgttc

SEQ ID NO: 32134 - DNA, 21 bp, synthetic construct
  source 1..21: mol_type = other DNA; mol_type = other DNA
ttttctcgagcaggacataat

SEQ ID NO: 32135 - DNA, 21 bp, synthetic construct
  source 1..21: mol_type = other DNA; mol_type = other DNA
tgcaataaacctctcaccgcg

SEQ ID NO: 32136 - DNA, 21 bp, synthetic construct
  source 1..21: mol_type = other DNA; mol_type = other DNA
tacgtccggaacgacgataag

SEQ ID NO: 32137 - DNA, 21 bp, synthetic construct
  source 1..21: mol_type = other DNA; mol_type = other DNA
aaggatggcctttcgaggtgg

SEQ ID NO: 32138 - DNA, 21 bp, synthetic construct
  source 1..21: mol_type = other DNA
ttccatagcaccaatggcgta

SEQ ID NO: 32139 - DNA, 21 bp, synthetic construct
  source 1..21: mol_type = other DNA; mol_type = other DNA
tacgttaaacttcagccaaac

SEQ ID NO: 32140 - DNA, 21 bp, synthetic construct
  source 1..21: mol_type = other DNA; mol_type = other DNA
tattatacaggaatgcgggac

SEQ ID NO: 32141 - DNA, 21 bp, synthetic construct
  source 1..21: mol_type = other DNA; mol_type = other DNA
ttgtctaaggcaggaattaat

SEQ ID NO: 32142 - DNA, 21 bp, synthetic construct
  source 1..21: mol_type = other DNA; mol_type = other DNA
aagcctgccaactacgactgc

SEQ ID NO: 32143 - DNA, 21 bp, synthetic construct
  source 1..21: mol_type = other DNA; mol_type = other DNA
tactcacgaagcaattcgaat

SEQ ID NO: 32144 - DNA, 21 bp, synthetic construct
  source 1..21: mol_type = other DNA; mol_type = other DNA
tatgctaaaggggggtggaac

SEQ ID NO: 32145 - DNA, 21 bp, synthetic construct
  source 1..21: mol_type = other DNA; mol_type = other DNA
tattctagaatcaatataaac

SEQ ID NO: 32146 - DNA, 21 bp, synthetic construct
  source 1..21: mol_type = other DNA; mol_type = other DNA
tacttcagtgggcagaatgaa

SEQ ID NO: 32147 - DNA, 21 bp, synthetic construct
  source 1..21: mol_type = other DNA; mol_type = other DNA
tcgatgcaagatcgcaagtgg

SEQ ID NO: 32148 - DNA, 21 bp, synthetic construct
  source 1..21: mol_type = other DNA; mol_type = other DNA
tttcctggttcgatatgtgtt

SEQ ID NO: 32149 - DNA, 21 bp, synthetic construct
  source 1..21: mol_type = other DNA; mol_type = other DNA
tgtaagcctggatcacccctc

SEQ ID NO: 32150 - DNA, 21 bp, synthetic construct
  source 1..21: mol_type = other DNA; mol_type = other DNA
tgtaggggggacaatggagta

SEQ ID NO: 32151 - DNA, 21 bp, synthetic construct
  source 1..21: mol_type = other DNA; mol_type = other DNA
ttggaaaagccatgccttacc

SEQ ID NO: 32152 - DNA, 21 bp, synthetic construct
  source 1..21: mol_type = other DNA; mol_type = other DNA
ttcttccatggaaaaatcgag

SEQ ID NO: 32153 - DNA, 21 bp, synthetic construct
  source 1..21: mol_type = other DNA; mol_type = other DNA
tttgcgcggaatgggtataac

SEQ ID NO: 32154 - DNA, 21 bp, synthetic construct
  source 1..21: mol_type = other DNA; mol_type = other DNA
ttcgctaggagcggccacaac

SEQ ID NO: 32155 - DNA, 21 bp, synthetic construct
  source 1..21: mol_type = other DNA; mol_type = other DNA
tgcaaaccgggtcaacctatg

SEQ ID NO: 32156 - DNA, 21 bp, synthetic construct
  source 1..21: mol_type = other DNA; mol_type = other DNA
ttctggagtggggttccagct

SEQ ID NO: 32157 - DNA, 21 bp, synthetic construct
  source 1..21: mol_type = other DNA; mol_type = other DNA
tacagtaggattaactctaat

SEQ ID NO: 32158 - DNA, 21 bp, synthetic construct
  source 1..21: mol_type = other DNA; mol_type = other DNA
ggcgggagtacaagttcgtgg

SEQ ID NO: 32159 - DNA, 21 bp, synthetic construct
  source 1..21: mol_type = other DNA; mol_type = other DNA
tatgccaggcagggtcataat

SEQ ID NO: 32160 - DNA, 21 bp, synthetic construct
  source 1..21: mol_type = other DNA; mol_type = other DNA
tggttcaccggcatacgagat

SEQ ID NO: 32161 - DNA, 21 bp, synthetic construct
  source 1..21: mol_type = other DNA; mol_type = other DNA
tactttaccggggtacaaacc

SEQ ID NO: 32162 - DNA, 21 bp, synthetic construct
  source 1..21: mol_type = other DNA; mol_type = other DNA
tattttcacgggcagctggag

SEQ ID NO: 32163 - DNA, 21 bp, synthetic construct
  source 1..21: mol_type = other DNA; mol_type = other DNA
tattactcaggcaagcacgaa

SEQ ID NO: 32164 - DNA, 21 bp, synthetic construct
  source 1..21: mol_type = other DNA; mol_type = other DNA
tgcaaacccggcagctcgggg

SEQ ID NO: 32165 - DNA, 21 bp, synthetic construct
  source 1..21: mol_type = other DNA; mol_type = other DNA
tgggtaagatcggacaccaaa

SEQ ID NO: 32166 - DNA, 21 bp, synthetic construct
  source 1..21: mol_type = other DNA; mol_type = other DNA
tactacagcggtcaaaaagaa

SEQ ID NO: 32167 - DNA, 21 bp, synthetic construct
  source 1..21: mol_type = other DNA
gttgacgactataacatatat

SEQ ID NO: 32168 - DNA, 21 bp, synthetic construct
  source 1..21: mol_type = other DNA; mol_type = other DNA
aggttgtacgatgcaattgct

SEQ ID NO: 32169 - DNA, 21 bp, synthetic construct
  source 1..21: mol_type = other DNA; mol_type = other DNA
ttctcgaaactaggttacaac

SEQ ID NO: 32170 - DNA, 21 bp, synthetic construct
  source 1..21: mol_type = other DNA; mol_type = other DNA
tacgcgcgtggaaatattaac

SEQ ID NO: 32171 - DNA, 21 bp, synthetic construct
  source 1..21: mol_type = other DNA; mol_type = other DNA
tattcacgccacggagctaac

SEQ ID NO: 32172 - DNA, 21 bp, synthetic construct
  source 1..21: mol_type = other DNA; mol_type = other DNA
tacgctaaagggggattaaat

SEQ ID NO: 32173 - DNA, 21 bp, synthetic construct
  source 1..21: mol_type = other DNA; mol_type = other DNA
tactctcgcataaacgcgaat

SEQ ID NO: 32174 - DNA, 21 bp, synthetic construct
  source 1..21: mol_type = other DNA; mol_type = other DNA
tactttactggcactgccaaa

SEQ ID NO: 32175 - DNA, 21 bp, synthetic construct
  source 1..21: mol_type = other DNA; mol_type = other DNA
tggtggagttctattaaagaa

SEQ ID NO: 32176 - DNA, 21 bp, synthetic construct
  source 1..21: mol_type = other DNA; mol_type = other DNA
ctcgcaaagacaggttgtatg

SEQ ID NO: 32177 - DNA, 21 bp, synthetic construct
  source 1..21: mol_type = other DNA; mol_type = other DNA
tattcaaggcttaacggcttg

SEQ ID NO: 32178 - DNA, 21 bp, synthetic construct
  source 1..21: mol_type = other DNA; mol_type = other DNA
tattggcagggcaaagttgct

SEQ ID NO: 32179 - DNA, 21 bp, synthetic construct
  source 1..21: mol_type = other DNA; mol_type = other DNA
tacgtgcgcagcgaccccatg

SEQ ID NO: 32180 - DNA, 21 bp, synthetic construct
  source 1..21: mol_type = other DNA; mol_type = other DNA
cgtaacggtactagcagttgg

SEQ ID NO: 32181 - DNA, 21 bp, synthetic construct
  source 1..21: mol_type = other DNA; mol_type = other DNA
gatactaaccataagtggtcg

SEQ ID NO: 32182 - DNA, 21 bp, synthetic construct
  source 1..21: mol_type = other DNA; mol_type = other DNA
tattcccgtgtcaatattaat

SEQ ID NO: 32183 - DNA, 21 bp, synthetic construct
  source 1..21: mol_type = other DNA; mol_type = other DNA
tatagccggacaaattttaat

SEQ ID NO: 32184 - DNA, 21 bp, synthetic construct
  source 1..21: mol_type = other DNA; mol_type = other DNA
tcggacggccaatcaaagtgg

SEQ ID NO: 32185 - DNA, 21 bp, synthetic construct
  source 1..21: mol_type = other DNA; mol_type = other DNA
catatgtccacgaatggcgtt

SEQ ID NO: 32186 - DNA, 21 bp, synthetic construct
  source 1..21: mol_type = other DNA; mol_type = other DNA
tacttcgctggaagagcagat

SEQ ID NO: 32187 - DNA, 21 bp, synthetic construct
  source 1..21: mol_type = other DNA; mol_type = other DNA
tacagccgcattagttcgaat

SEQ ID NO: 32188 - DNA, 21 bp, synthetic construct
  source 1..21: mol_type = other DNA; mol_type = other DNA
tattcacgtcttaatgtgggg

SEQ ID NO: 32189 - DNA, 21 bp, synthetic construct
  source 1..21: mol_type = other DNA; mol_type = other DNA
gtatctactcactgtttcgcg

SEQ ID NO: 32190 - DNA, 21 bp, synthetic construct
  source 1..21: mol_type = other DNA; mol_type = other DNA
ttatctaggagcgggtggaac

SEQ ID NO: 32191 - DNA, 21 bp, synthetic construct
  source 1..21: mol_type = other DNA; mol_type = other DNA
tggtggagtggaactcaagcg

SEQ ID NO: 32192 - DNA, 21 bp, synthetic construct
  source 1..21: mol_type = other DNA; mol_type = other DNA
tacttcacaggtgtagcgact

SEQ ID NO: 32193 - DNA, 21 bp, synthetic construct
  source 1..21: mol_type = other DNA; mol_type = other DNA
tattatacgggtcaagtcctt

SEQ ID NO: 32194 - DNA, 21 bp, synthetic construct
  source 1..21: mol_type = other DNA; mol_type = other DNA
tactatcacggaatagcagct

SEQ ID NO: 32195 - DNA, 21 bp, synthetic construct
  source 1..21: mol_type = other DNA; mol_type = other DNA
ccggggtcaacgaatggccgg

SEQ ID NO: 32196 - DNA, 21 bp, synthetic construct
  source 1..21: mol_type = other DNA; mol_type = other DNA
tactacagcggacaaagggaa

SEQ ID NO: 32197 - DNA, 21 bp, synthetic construct
  source 1..21: mol_type = other DNA; mol_type = other DNA
aacgcgagggagggccggaac

SEQ ID NO: 32198 - DNA, 21 bp, synthetic construct
  source 1..21: mol_type = other DNA; mol_type = other DNA
tacttcagcggtatgcaggcg

SEQ ID NO: 32199 - DNA, 21 bp, synthetic construct
  source 1..21: mol_type = other DNA; mol_type = other DNA
tacagtaaacaaggagtgaat

SEQ ID NO: 32200 - DNA, 21 bp, synthetic construct
  source 1..21: mol_type = other DNA; mol_type = other DNA
ggagatgaatgggagacttac

SEQ ID NO: 32201 - DNA, 21 bp, synthetic construct
  source 1..21: mol_type = other DNA; mol_type = other DNA
tattggacaggcaaggctgac

SEQ ID NO: 32202 - DNA, 21 bp, synthetic construct
  source 1..21: mol_type = other DNA; mol_type = other DNA
gatctgagagcagttagctgg

SEQ ID NO: 32203 - DNA, 21 bp, synthetic construct
  source 1..21: mol_type = other DNA; mol_type = other DNA
agcatgcaaagccgatcttgg

SEQ ID NO: 32204 - DNA, 21 bp, synthetic construct
  source 1..21: mol_type = other DNA; mol_type = other DNA
aaacaaggcgaggggagttgt

SEQ ID NO: 32205 - DNA, 21 bp, synthetic construct
  source 1..21: mol_type = other DNA; mol_type = other DNA
ttcagtcggctagggcataac

SEQ ID NO: 32206 - DNA, 21 bp, synthetic construct
  source 1..21: mol_type = other DNA; mol_type = other DNA
ttttggagtgggaaacttgat

SEQ ID NO: 32207 - DNA, 21 bp, synthetic construct
  source 1..21: mol_type = other DNA; mol_type = other DNA
tgcgcgcctgccctccacgaa

SEQ ID NO: 32208 - DNA, 21 bp, synthetic construct
  source 1..21: mol_type = other DNA; mol_type = other DNA
agtgatggacagagtaaatgg

SEQ ID NO: 32209 - DNA, 21 bp, synthetic construct
  source 1..21: mol_type = other DNA; mol_type = other DNA
tacgcacgccagaatatcaat

SEQ ID NO: 32210 - DNA, 21 bp, synthetic construct
  source 1..21: mol_type = other DNA; mol_type = other DNA
agagatgagtatgtgatgtat

SEQ ID NO: 32211 - DNA, 21 bp, synthetic construct
  source 1..21: mol_type = other DNA; mol_type = other DNA
agaaaccgggacgtataccct

SEQ ID NO: 32212 - DNA, 21 bp, synthetic construct
  source 1..21: mol_type = other DNA; mol_type = other DNA
tattcaaaaagtggagaaaac

SEQ ID NO: 32213 - DNA, 21 bp, synthetic construct
  source 1..21: mol_type = other DNA; mol_type = other DNA
tattggcagggaactgtcgca

SEQ ID NO: 32214 - DNA, 21 bp, synthetic construct
  source 1..21: mol_type = other DNA; mol_type = other DNA
taccataggattgggacgaac

SEQ ID NO: 32215 - DNA, 21 bp, synthetic construct
  source 1..21: mol_type = other DNA; mol_type = other DNA
tgtgacggcgttcctcgaggt

SEQ ID NO: 32216 - DNA, 21 bp, synthetic construct
  source 1..21: mol_type = other DNA; mol_type = other DNA
tgtgccccggcatacagagag

SEQ ID NO: 32217 - DNA, 21 bp, synthetic construct
  source 1..21: mol_type = other DNA; mol_type = other DNA
tacagtcggcaaggagataac

SEQ ID NO: 32218 - DNA, 21 bp, synthetic construct
  source 1..21: mol_type = other DNA; mol_type = other DNA
tgggtcagatcagacataaaa

SEQ ID NO: 32219 - DNA, 21 bp, synthetic construct
  source 1..21: mol_type = other DNA; mol_type = other DNA
tgcggaaagaagcaactagat

SEQ ID NO: 32220 - DNA, 21 bp, synthetic construct
  source 1..21: mol_type = other DNA; mol_type = other DNA
cttctagcaagctcgtcgtgg

SEQ ID NO: 32221 - DNA, 21 bp, synthetic construct
  source 1..21: mol_type = other DNA; mol_type = other DNA
tactacagcggttacaaagac

SEQ ID NO: 32222 - DNA, 21 bp, synthetic construct
  source 1..21: mol_type = other DNA; mol_type = other DNA
tacacacggttaaaccagaat

SEQ ID NO: 32223 - DNA, 21 bp, synthetic construct
  source 1..21: mol_type = other DNA; mol_type = other DNA
ttctcaagggctggggtcaac

SEQ ID NO: 32224 - DNA, 21 bp, synthetic construct
  source 1..21: mol_type = other DNA; mol_type = other DNA
ttctggagcgggatgaaagat

SEQ ID NO: 32225 - DNA, 21 bp, synthetic construct
  source 1..21: mol_type = other DNA; mol_type = other DNA
tatttctctggcctaagggat

SEQ ID NO: 32226 - DNA, 21 bp, synthetic construct
  source 1..21: mol_type = other DNA; mol_type = other DNA
aactatgcgcgaagtgctgaa

SEQ ID NO: 32227 - DNA, 21 bp, synthetic construct
  source 1..21: mol_type = other DNA; mol_type = other DNA
tactcgagaagtggaatgaac

SEQ ID NO: 32228 - DNA, 21 bp, synthetic construct
  source 1..21: mol_type = other DNA; mol_type = other DNA
ttcttcagtgggacaagggcg

SEQ ID NO: 32229 - DNA, 21 bp, synthetic construct
  source 1..21: mol_type = other DNA; mol_type = other DNA
acatggatgggtgacaatgca

SEQ ID NO: 32230 - DNA, 21 bp, synthetic construct
  source 1..21: mol_type = other DNA; mol_type = other DNA
ggggccggaacttccaaatgg

SEQ ID NO: 32231 - DNA, 21 bp, synthetic construct
  source 1..21: mol_type = other DNA; mol_type = other DNA
ggaagcggtacatcacgctgg

SEQ ID NO: 32232 - DNA, 21 bp, synthetic construct
  source 1..21: mol_type = other DNA; mol_type = other DNA
tttttcagcggcattatggaa

SEQ ID NO: 32233 - DNA, 21 bp, synthetic construct
  source 1..21: mol_type = other DNA; mol_type = other DNA
tatgcacgcggtgggtataat

SEQ ID NO: 32234 - DNA, 21 bp, synthetic construct
  source 1..21: mol_type = other DNA; mol_type = other DNA
tacagccgatccaatttcaat

SEQ ID NO: 32235 - DNA, 21 bp, synthetic construct
  source 1..21: mol_type = other DNA; mol_type = other DNA
cagatggaggaccgtgcatgg

SEQ ID NO: 32236 - DNA, 21 bp, synthetic construct
  source 1..21: mol_type = other DNA; mol_type = other DNA
tgcaatgagcctatgaccgcc

SEQ ID NO: 32237 - DNA, 21 bp, synthetic construct
  source 1..21: mol_type = other DNA; mol_type = other DNA
ggcagtgagttccttccttgg

SEQ ID NO: 32238 - DNA, 21 bp, synthetic construct
  source 1..21: mol_type = other DNA; mol_type = other DNA
tatttccacgggcgttcggaa

SEQ ID NO: 32239 - DNA, 21 bp, synthetic construct
  source 1..21: mol_type = other DNA; mol_type = other DNA
atggatgggtcgtcgaagtgg

SEQ ID NO: 32240 - DNA, 21 bp, synthetic construct
  source 1..21: mol_type = other DNA; mol_type = other DNA
tgggaaagtacaaatggcgtg

SEQ ID NO: 32241 - DNA, 21 bp, synthetic construct
  source 1..21: mol_type = other DNA; mol_type = other DNA
ccaacgagcacgaacggggtt

SEQ ID NO: 32242 - DNA, 21 bp, synthetic construct
  source 1..21: mol_type = other DNA; mol_type = other DNA
tacgcccgagctgggctcaat

SEQ ID NO: 32243 - DNA, 21 bp, synthetic construct
  source 1..21: mol_type = other DNA; mol_type = other DNA
ccttgcaaaactggaggagaa

SEQ ID NO: 32244 - DNA, 21 bp, synthetic construct
  source 1..21: mol_type = other DNA; mol_type = other DNA
tattttaccggagaaatactg

SEQ ID NO: 32245 - DNA, 21 bp, synthetic construct
  source 1..21: mol_type = other DNA; mol_type = other DNA
tattggaaaccagaagttaac

SEQ ID NO: 32246 - DNA, 21 bp, synthetic construct
  source 1..21: mol_type = other DNA; mol_type = other DNA
gggggtgggtcaagccactgg

SEQ ID NO: 32247 - DNA, 21 bp, synthetic construct
  source 1..21: mol_type = other DNA; mol_type = other DNA
tacgcaaagtctaactttaac

SEQ ID NO: 32248 - DNA, 21 bp, synthetic construct
  source 1..21: mol_type = other DNA; mol_type = other DNA
tatgccagaggaggacacaac

SEQ ID NO: 32249 - DNA, 21 bp, synthetic construct
  source 1..21: mol_type = other DNA; mol_type = other DNA
ggcatcgtgtctgttagttgg

SEQ ID NO: 32250 - DNA, 21 bp, synthetic construct
  source 1..21: mol_type = other DNA; mol_type = other DNA
ttagctaagacgggtgccaat

SEQ ID NO: 32251 - DNA, 21 bp, synthetic construct
  source 1..21: mol_type = other DNA; mol_type = other DNA
cgggtcatagacgctttccct

SEQ ID NO: 32252 - DNA, 21 bp, synthetic construct
  source 1..21: mol_type = other DNA; mol_type = other DNA
tacgctcgtgggggtatcaac

SEQ ID NO: 32253 - DNA, 21 bp, synthetic construct
  source 1..21: mol_type = other DNA; mol_type = other DNA
tattctcgtcatggattcaat

SEQ ID NO: 32254 - DNA, 21 bp, synthetic construct
  source 1..21: mol_type = other DNA; mol_type = other DNA
tatttcagcggtatgccggat

SEQ ID NO: 32255 - DNA, 21 bp, synthetic construct
  source 1..21: mol_type = other DNA; mol_type = other DNA
ccagttgagagtaggacttgg

SEQ ID NO: 32256 - DNA, 21 bp, synthetic construct
  source 1..21: mol_type = other DNA; mol_type = other DNA
tactcccgtgtgagcgttaac

SEQ ID NO: 32257 - DNA, 21 bp, synthetic construct
  source 1..21: mol_type = other DNA; mol_type = other DNA
acatataccggtgatccagcg

SEQ ID NO: 32258 - DNA, 21 bp, synthetic construct
  source 1..21: mol_type = other DNA; mol_type = other DNA
tacgctaagaatggaacaaac

SEQ ID NO: 32259 - DNA, 21 bp, synthetic construct
  source 1..21: mol_type = other DNA; mol_type = other DNA
tggacggacggcacaaggtac

SEQ ID NO: 32260 - DNA, 21 bp, synthetic construct
  source 1..21: mol_type = other DNA; mol_type = other DNA
tattacacaggtgtaacgaaa

SEQ ID NO: 32261 - DNA, 21 bp, synthetic construct
  source 1..21: mol_type = other DNA; mol_type = other DNA
tgcaaaggcgtgccgtgttgt

SEQ ID NO: 32262 - DNA, 21 bp, synthetic construct
  source 1..21: mol_type = other DNA; mol_type = other DNA
tgtgacaggtcctgcaaagcg

SEQ ID NO: 32263 - DNA, 21 bp, synthetic construct
  source 1..21: mol_type = other DNA; mol_type = other DNA
acgcgatgcgtcggggaaatt

SEQ ID NO: 32264 - DNA, 21 bp, synthetic construct
  source 1..21: mol_type = other DNA; mol_type = other DNA
gtgatggaagccagagcgtgg

SEQ ID NO: 32265 - DNA, 21 bp, synthetic construct
  source 1..21: mol_type = other DNA; mol_type = other DNA
atcgtatcgaccaacggggtc

SEQ ID NO: 32266 - DNA, 21 bp, synthetic construct
  source 1..21: mol_type = other DNA; mol_type = other DNA
tgtaaaccggaggcgttcccc

SEQ ID NO: 32267 - DNA, 21 bp, synthetic construct
  source 1..21: mol_type = other DNA; mol_type = other DNA
acggatgattggagtacatgg

SEQ ID NO: 32268 - DNA, 21 bp, synthetic construct
  source 1..21: mol_type = other DNA; mol_type = other DNA
gatatgagagaccacagatgg

SEQ ID NO: 32269 - DNA, 21 bp, synthetic construct
  source 1..21: mol_type = other DNA; mol_type = other DNA
tggacggatggtaccaggtac

SEQ ID NO: 32270 - DNA, 21 bp, synthetic construct
  source 1..21: mol_type = other DNA; mol_type = other DNA
tatgtaagtaccaatggagtg

SEQ ID NO: 32271 - DNA, 21 bp, synthetic construct
  source 1..21: mol_type = other DNA; mol_type = other DNA
tactgggctggcaaaatggaa

SEQ ID NO: 32272 - DNA, 21 bp, synthetic construct
  source 1..21: mol_type = other DNA; mol_type = other DNA
agagagccaacagtgaggtgg

SEQ ID NO: 32273 - DNA, 21 bp, synthetic construct
  source 1..21: mol_type = other DNA; mol_type = other DNA
tatgctcgggggaaccacaat

SEQ ID NO: 32274 - DNA, 21 bp, synthetic construct
  source 1..21: mol_type = other DNA; mol_type = other DNA
aaagagaaaccagacaagagg

SEQ ID NO: 32275 - DNA, 21 bp, synthetic construct
  source 1..21: mol_type = other DNA; mol_type = other DNA
gacatgaggtcgaccaaatgg

SEQ ID NO: 32276 - DNA, 21 bp, synthetic construct
  source 1..21: mol_type = other DNA; mol_type = other DNA
tatcacgccaagagtacgaat

SEQ ID NO: 32277 - DNA, 21 bp, synthetic construct
  source 1..21: mol_type = other DNA; mol_type = other DNA
tacgcgaagggaaacttgaat

SEQ ID NO: 32278 - DNA, 21 bp, synthetic construct
  source 1..21: mol_type = other DNA; mol_type = other DNA
tactcgaggcaaaacccaaat

SEQ ID NO: 32279 - DNA, 21 bp, synthetic construct
  source 1..21: mol_type = other DNA; mol_type = other DNA
tattcgagaatggggctaaac

SEQ ID NO: 32280 - DNA, 21 bp, synthetic construct
  source 1..21: mol_type = other DNA; mol_type = other DNA
tacttcagcggcacagtattt

SEQ ID NO: 32281 - DNA, 21 bp, synthetic construct
  source 1..21: mol_type = other DNA; mol_type = other DNA
tatgctgctagcggacgaaac

SEQ ID NO: 32282 - DNA, 21 bp, synthetic construct
  source 1..21: mol_type = other DNA; mol_type = other DNA
tactggtcaaatgtcaaagac

SEQ ID NO: 32283 - DNA, 21 bp, synthetic construct
  source 1..21: mol_type = other DNA; mol_type = other DNA
actaggtggggggacccggcc

SEQ ID NO: 32284 - DNA, 21 bp, synthetic construct
  source 1..21: mol_type = other DNA; mol_type = other DNA
tacgttaggtcacaaccacag

SEQ ID NO: 32285 - DNA, 21 bp, synthetic construct
  source 1..21: mol_type = other DNA; mol_type = other DNA
gttgctacacatggggcaggc

SEQ ID NO: 32286 - DNA, 21 bp, synthetic construct
  source 1..21: mol_type = other DNA; mol_type = other DNA
tgcaagccccctcccatcgag

SEQ ID NO: 32287 - DNA, 21 bp, synthetic construct
  source 1..21: mol_type = other DNA; mol_type = other DNA
cgagacgattatctaagttgg

SEQ ID NO: 32288 - DNA, 21 bp, synthetic construct
  source 1..21: mol_type = other DNA; mol_type = other DNA
cccctcagactggatcccagg

SEQ ID NO: 32289 - DNA, 21 bp, synthetic construct
  source 1..21: mol_type = other DNA; mol_type = other DNA
tgccgtcccgattaccgcgag

SEQ ID NO: 32290 - DNA, 21 bp, synthetic construct
  source 1..21: mol_type = other DNA; mol_type = other DNA
gagaggaactcctgcatgcac

SEQ ID NO: 32291 - DNA, 21 bp, synthetic construct
  source 1..21: mol_type = other DNA; mol_type = other DNA
tacgcgagagcaggaataaac

SEQ ID NO: 32292 - DNA, 21 bp, synthetic construct
  source 1..21: mol_type = other DNA; mol_type = other DNA
attatgggggatagaatttgg

SEQ ID NO: 32293 - DNA, 21 bp, synthetic construct
  source 1..21: mol_type = other DNA; mol_type = other DNA
ttctggagtggaacggtcgct

SEQ ID NO: 32294 - DNA, 21 bp, synthetic construct
  source 1..21: mol_type = other DNA; mol_type = other DNA
tgtaacctgagtcctacatcg

SEQ ID NO: 32295 - DNA, 21 bp, synthetic construct
  source 1..21: mol_type = other DNA; mol_type = other DNA
tactacagtgggaaacatgag

SEQ ID NO: 32296 - DNA, 21 bp, synthetic construct
  source 1..21: mol_type = other DNA; mol_type = other DNA
ttctggtcaggcaaggtagac

SEQ ID NO: 32297 - DNA, 21 bp, synthetic construct
  source 1..21: mol_type = other DNA; mol_type = other DNA
tacttttcaggaactgtctac

SEQ ID NO: 32298 - DNA, 21 bp, synthetic construct
  source 1..21: mol_type = other DNA; mol_type = other DNA
acaaaaaactcgaccacgtgt

SEQ ID NO: 32299 - DNA, 21 bp, synthetic construct
  source 1..21: mol_type = other DNA; mol_type = other DNA
tgtaagcctggaatgggtgca

SEQ ID NO: 32300 - DNA, 21 bp, synthetic construct
  source 1..21: mol_type = other DNA; mol_type = other DNA
tgtacgagcaagacgggaagt

SEQ ID NO: 32301 - DNA, 21 bp, synthetic construct
  source 1..21: mol_type = other DNA; mol_type = other DNA
ttaagtaggactggggacaat

SEQ ID NO: 32302 - DNA, 21 bp, synthetic construct
  source 1..21: mol_type = other DNA; mol_type = other DNA
ttgtctagaatgaatgagaac

SEQ ID NO: 32303 - DNA, 21 bp, synthetic construct
  source 1..21: mol_type = other DNA; mol_type = other DNA
tacagcagagtaggaccggta

SEQ ID NO: 32304 - DNA, 21 bp, synthetic construct
  source 1..21: mol_type = other DNA; mol_type = other DNA
tgtaaacccagccccatgccc

SEQ ID NO: 32305 - DNA, 21 bp, synthetic construct
  source 1..21: mol_type = other DNA; mol_type = other DNA
tacagccgtacaaactacaat

SEQ ID NO: 32306 - DNA, 21 bp, synthetic construct
  source 1..21: mol_type = other DNA; mol_type = other DNA
aaggcgacacaacaagaatgt

SEQ ID NO: 32307 - DNA, 21 bp, synthetic construct
  source 1..21: mol_type = other DNA; mol_type = other DNA
tactataccggaattccgcat

SEQ ID NO: 32308 - DNA, 21 bp, synthetic construct
  source 1..21: mol_type = other DNA; mol_type = other DNA
tactggaccggcacggcaagt

SEQ ID NO: 32309 - DNA, 21 bp, synthetic construct
  source 1..21: mol_type = other DNA; mol_type = other DNA
attcaccgccttctgcccagt

SEQ ID NO: 32310 - DNA, 21 bp, synthetic construct
  source 1..21: mol_type = other DNA; mol_type = other DNA
tacagccgttccggtagcaac

SEQ ID NO: 32311 - DNA, 21 bp, synthetic construct
  source 1..21: mol_type = other DNA; mol_type = other DNA
aggatggacaatgtcttcccc

SEQ ID NO: 32312 - DNA, 21 bp, synthetic construct
  source 1..21: mol_type = other DNA; mol_type = other DNA
tactggagtgggacggtcaaa

SEQ ID NO: 32313 - DNA, 21 bp, synthetic construct
  source 1..21: mol_type = other DNA; mol_type = other DNA
tttttttcaggaacgcgagca

SEQ ID NO: 32314 - DNA, 21 bp, synthetic construct
  source 1..21: mol_type = other DNA; mol_type = other DNA
tgtagagataagatgccaggg

SEQ ID NO: 32315 - DNA, 21 bp, synthetic construct
  source 1..21: mol_type = other DNA; mol_type = other DNA
aacagcagcaccaacggcgta

SEQ ID NO: 32316 - DNA, 21 bp, synthetic construct
  source 1..21: mol_type = other DNA; mol_type = other DNA
tacttcacaggagtgactgtc

SEQ ID NO: 32317 - DNA, 21 bp, synthetic construct
  source 1..21: mol_type = other DNA; mol_type = other DNA
ttctttacaggcgtcgttagt

SEQ ID NO: 32318 - DNA, 21 bp, synthetic construct
  source 1..21: mol_type = other DNA; mol_type = other DNA
tacctccattcacagtcgtac

SEQ ID NO: 32319 - DNA, 21 bp, synthetic construct
  source 1..21: mol_type = other DNA; mol_type = other DNA
ttgctggcttcgcaaacgtgg

SEQ ID NO: 32320 - DNA, 21 bp, synthetic construct
  source 1..21: mol_type = other DNA; mol_type = other DNA
tattcgcgcttgaaccaaaac

SEQ ID NO: 32321 - DNA, 21 bp, synthetic construct
  source 1..21: mol_type = other DNA; mol_type = other DNA
tactccagaatgggaaataac

SEQ ID NO: 32322 - DNA, 21 bp, synthetic construct
  source 1..21: mol_type = other DNA; mol_type = other DNA
tattggtcaggtcagatcgat

SEQ ID NO: 32323 - DNA, 21 bp, synthetic construct
  source 1..21: mol_type = other DNA; mol_type = other DNA
atactgagttcttcaggttgg

SEQ ID NO: 32324 - DNA, 21 bp, synthetic construct
  source 1..21: mol_type = other DNA; mol_type = other DNA
ctcagcagggcgtcttttgac

SEQ ID NO: 32325 - DNA, 21 bp, synthetic construct
  source 1..21: mol_type = other DNA; mol_type = other DNA
gcgctctccgacaggtcctgg

SEQ ID NO: 32326 - DNA, 21 bp, synthetic construct
  source 1..21: mol_type = other DNA; mol_type = other DNA
tgtgtcgacaagagacatccg

SEQ ID NO: 32327 - DNA, 21 bp, synthetic construct
  source 1..21: mol_type = other DNA; mol_type = other DNA
tggtggagtgcagtaccggaa

SEQ ID NO: 32328 - DNA, 21 bp, synthetic construct
  source 1..21: mol_type = other DNA; mol_type = other DNA
cgcgacgcagttagtcgttgg

SEQ ID NO: 32329 - DNA, 21 bp, synthetic construct
  source 1..21: mol_type = other DNA; mol_type = other DNA
agcatgcccgaccggagttgg

SEQ ID NO: 32330 - DNA, 21 bp, synthetic construct
  source 1..21: mol_type = other DNA; mol_type = other DNA
tatttcacgggagtgcagact

SEQ ID NO: 32331 - DNA, 21 bp, synthetic construct
  source 1..21: mol_type = other DNA; mol_type = other DNA
tattccagaacgaacgtaaac

SEQ ID NO: 32332 - DNA, 21 bp, synthetic construct
  source 1..21: mol_type = other DNA; mol_type = other DNA
aaagacgaattcactatctat

SEQ ID NO: 32333 - DNA, 21 bp, synthetic construct
  source 1..21: mol_type = other DNA; mol_type = other DNA
tgcgccaccaaatgcaaaccc

SEQ ID NO: 32334 - DNA, 21 bp, synthetic construct
  source 1..21: mol_type = other DNA; mol_type = other DNA
ggaaataagcattgtatggat

SEQ ID NO: 32335 - DNA, 21 bp, synthetic construct
  source 1..21: mol_type = other DNA; mol_type = other DNA
tacttttcagccgtacgcgag

SEQ ID NO: 32336 - DNA, 21 bp, synthetic construct
  source 1..21: mol_type = other DNA; mol_type = other DNA
tacagcaggcagaacaataac

SEQ ID NO: 32337 - DNA, 21 bp, synthetic construct
  source 1..21: mol_type = other DNA; mol_type = other DNA
tatagtaggcagggaaccaac

SEQ ID NO: 32338 - DNA, 21 bp, synthetic construct
  source 1..21: mol_type = other DNA; mol_type = other DNA
tggcccaacggcgtcgatggt

SEQ ID NO: 32339 - DNA, 21 bp, synthetic construct
  source 1..21: mol_type = other DNA; mol_type = other DNA
tgcaagcctgtgcacccagag

SEQ ID NO: 32340 - DNA, 21 bp, synthetic construct
  source 1..21: mol_type = other DNA; mol_type = other DNA
tggttttctgggatacaagaa

SEQ ID NO: 32341 - DNA, 21 bp, synthetic construct
  source 1..21: mol_type = other DNA; mol_type = other DNA
tacgcgaggatgggcttcaac

SEQ ID NO: 32342 - DNA, 21 bp, synthetic construct
  source 1..21: mol_type = other DNA; mol_type = other DNA
tatttcaccggaacggcaaag

SEQ ID NO: 32343 - DNA, 21 bp, synthetic construct
  source 1..21: mol_type = other DNA; mol_type = other DNA
tattctagggcgaactttaat

SEQ ID NO: 32344 - DNA, 21 bp, synthetic construct
  source 1..21: mol_type = other DNA; mol_type = other DNA
ttttggacgggcaaagttgaa

SEQ ID NO: 32345 - DNA, 21 bp, synthetic construct
  source 1..21: mol_type = other DNA; mol_type = other DNA
ttgagaaatggaactccggca

SEQ ID NO: 32346 - DNA, 21 bp, synthetic construct
  source 1..21: mol_type = other DNA; mol_type = other DNA
tacagtcgtatccatcccaac

SEQ ID NO: 32347 - DNA, 21 bp, synthetic construct
  source 1..21: mol_type = other DNA; mol_type = other DNA
tatttcaccgcgaagattgaa

SEQ ID NO: 32348 - DNA, 21 bp, synthetic construct
  source 1..21: mol_type = other DNA; mol_type = other DNA
ggacccccgagatgccctgct

SEQ ID NO: 32349 - DNA, 21 bp, synthetic construct
  source 1..21: mol_type = other DNA; mol_type = other DNA
cgtctccctacaacgccatgc

SEQ ID NO: 32350 - DNA, 21 bp, synthetic construct
  source 1..21: mol_type = other DNA; mol_type = other DNA
tactctcgagcgggggacggc

SEQ ID NO: 32351 - DNA, 21 bp, synthetic construct
  source 1..21: mol_type = other DNA; mol_type = other DNA
ggcatggctgaccgcgcatgg

SEQ ID NO: 32352 - DNA, 21 bp, synthetic construct
  source 1..21: mol_type = other DNA; mol_type = other DNA
tgcatgtcagacagtaaggca

SEQ ID NO: 32353 - DNA, 21 bp, synthetic construct
  source 1..21: mol_type = other DNA; mol_type = other DNA
ttatcacgcgcaagcttcgat

SEQ ID NO: 32354 - DNA, 21 bp, synthetic construct
  source 1..21: mol_type = other DNA; mol_type = other DNA
tatgccaaagccaactgcaac

SEQ ID NO: 32355 - DNA, 21 bp, synthetic construct
  source 1..21: mol_type = other DNA; mol_type = other DNA
tatcatcgacagaatccaatg

SEQ ID NO: 32356 - DNA, 21 bp, synthetic construct
  source 1..21: mol_type = other DNA; mol_type = other DNA
tacgcaagagctgggcataac

SEQ ID NO: 32357 - DNA, 21 bp, synthetic construct
  source 1..21: mol_type = other DNA; mol_type = other DNA
tgtaaaccaatgacgcacgag

SEQ ID NO: 32358 - DNA, 21 bp, synthetic construct
  source 1..21: mol_type = other DNA; mol_type = other DNA
agtctctcttccagggattgg

SEQ ID NO: 32359 - DNA, 21 bp, synthetic construct
  source 1..21: mol_type = other DNA; mol_type = other DNA
tgtgccccttatttgcaggaa

SEQ ID NO: 32360 - DNA, 21 bp, synthetic construct
  source 1..21: mol_type = other DNA; mol_type = other DNA
tgtacttctaagacgggctac

SEQ ID NO: 32361 - DNA, 21 bp, synthetic construct
  source 1..21: mol_type = other DNA; mol_type = other DNA
taccaccgtttaggttccacg

SEQ ID NO: 32362 - DNA, 21 bp, synthetic construct
  source 1..21: mol_type = other DNA; mol_type = other DNA
tgcatgccaaaaaaagaagcg

SEQ ID NO: 32363 - DNA, 21 bp, synthetic construct
  source 1..21: mol_type = other DNA; mol_type = other DNA
aaagacgactataatgtttac

SEQ ID NO: 32364 - DNA, 21 bp, synthetic construct
  source 1..21: mol_type = other DNA; mol_type = other DNA
ttctggtccggcgtcagcgag

SEQ ID NO: 32365 - DNA, 21 bp, synthetic construct
  source 1..21: mol_type = other DNA; mol_type = other DNA
tattgggatggcacccctgcc

SEQ ID NO: 32366 - DNA, 21 bp, synthetic construct
  source 1..21: mol_type = other DNA; mol_type = other DNA
tgcaagccttctccgatgccg

SEQ ID NO: 32367 - DNA, 21 bp, synthetic construct
  source 1..21: mol_type = other DNA; mol_type = other DNA
tgcaaacccgacgctgtgcgg

SEQ ID NO: 32368 - DNA, 21 bp, synthetic construct
  source 1..21: mol_type = other DNA; mol_type = other DNA
tacgttagaagcaaccccctt

SEQ ID NO: 32369 - DNA, 21 bp, synthetic construct
  source 1..21: mol_type = other DNA; mol_type = other DNA
cgtgacgatcatgtttactgg

SEQ ID NO: 32370 - DNA, 21 bp, synthetic construct
  source 1..21: mol_type = other DNA; mol_type = other DNA
tgctcatcgaaaaccggacat

SEQ ID NO: 32371 - DNA, 21 bp, synthetic construct
  source 1..21: mol_type = other DNA; mol_type = other DNA
tacttcgagggccaaagggag

SEQ ID NO: 32372 - DNA, 21 bp, synthetic construct
  source 1..21: mol_type = other DNA; mol_type = other DNA
tatgcgcggatgggagcaaac

SEQ ID NO: 32373 - DNA, 21 bp, synthetic construct
  source 1..21: mol_type = other DNA; mol_type = other DNA
tgtagagaagggagaagctcg

SEQ ID NO: 32374 - DNA, 21 bp, synthetic construct
  source 1..21: mol_type = other DNA; mol_type = other DNA
tattttgctggtgtgactgca

SEQ ID NO: 32375 - DNA, 21 bp, synthetic construct
  source 1..21: mol_type = other DNA; mol_type = other DNA
tacagtaggatgaatagcaat

SEQ ID NO: 32376 - DNA, 21 bp, synthetic construct
  source 1..21: mol_type = other DNA; mol_type = other DNA
tgcacgagcaaagcagggcac

SEQ ID NO: 32377 - DNA, 21 bp, synthetic construct
  source 1..21: mol_type = other DNA; mol_type = other DNA
gtggaggcctcgcggtcctgg

SEQ ID NO: 32378 - DNA, 21 bp, synthetic construct
  source 1..21: mol_type = other DNA; mol_type = other DNA
tgtccaaagccgatgaccgcg

SEQ ID NO: 32379 - DNA, 21 bp, synthetic construct
  source 1..21: mol_type = other DNA; mol_type = other DNA
cgtaacgaatttagcggatac

SEQ ID NO: 32380 - DNA, 21 bp, synthetic construct
  source 1..21: mol_type = other DNA; mol_type = other DNA
gacatggaatccgctgtatgg

SEQ ID NO: 32381 - DNA, 21 bp, synthetic construct
  source 1..21: mol_type = other DNA; mol_type = other DNA
tactatacaggacgcacgaat

SEQ ID NO: 32382 - DNA, 21 bp, synthetic construct
  source 1..21: mol_type = other DNA; mol_type = other DNA
tattggacgggcctcaaggat

SEQ ID NO: 32383 - DNA, 21 bp, synthetic construct
  source 1..21: mol_type = other DNA; mol_type = other DNA
cttcacaggtcaggcattgat

SEQ ID NO: 32384 - DNA, 21 bp, synthetic construct
  source 1..21: mol_type = other DNA; mol_type = other DNA
tactcgaaaaacggcgcaaac

SEQ ID NO: 32385 - DNA, 21 bp, synthetic construct
  source 1..21: mol_type = other DNA; mol_type = other DNA
atgaccggcacaagttgcgtg

SEQ ID NO: 32386 - DNA, 21 bp, synthetic construct
  source 1..21: mol_type = other DNA; mol_type = other DNA
tactttagcgggagatctgat

SEQ ID NO: 32387 - DNA, 21 bp, synthetic construct
  source 1..21: mol_type = other DNA; mol_type = other DNA
gtcgcaaagtgcggagctggc

SEQ ID NO: 32388 - DNA, 21 bp, synthetic construct
  source 1..21: mol_type = other DNA; mol_type = other DNA
cgggacgagcggtcttgtggc

SEQ ID NO: 32389 - DNA, 21 bp, synthetic construct
  source 1..21: mol_type = other DNA; mol_type = other DNA
tatgcacgtcaagggcacaac

SEQ ID NO: 32390 - DNA, 21 bp, synthetic construct
  source 1..21: mol_type = other DNA; mol_type = other DNA
cttgcgcgcagttgccctgat

SEQ ID NO: 32391 - DNA, 21 bp, synthetic construct
  source 1..21: mol_type = other DNA; mol_type = other DNA
gaggataagtgtaggcaattt

SEQ ID NO: 32392 - DNA, 21 bp, synthetic construct
  source 1..21: mol_type = other DNA; mol_type = other DNA
ggatcagaatttaaagtattt

SEQ ID NO: 32393 - DNA, 21 bp, synthetic construct
  source 1..21: mol_type = other DNA; mol_type = other DNA
tgcgcgcctttttatagagaa

SEQ ID NO: 32394 - DNA, 21 bp, synthetic construct
  source 1..21: mol_type = other DNA; mol_type = other DNA
tggccctccggatctgcgggt

SEQ ID NO: 32395 - DNA, 21 bp, synthetic construct
  source 1..21: mol_type = other DNA; mol_type = other DNA
tactggtccggaatgagagaa

SEQ ID NO: 32396 - DNA, 21 bp, synthetic construct
  source 1..21: mol_type = other DNA; mol_type = other DNA
aggtcggagttcgcgaccttt

SEQ ID NO: 32397 - DNA, 21 bp, synthetic construct
  source 1..21: mol_type = other DNA; mol_type = other DNA
tgtaaacccagcccttatcca

SEQ ID NO: 32398 - DNA, 21 bp, synthetic construct
  source 1..21: mol_type = other DNA; mol_type = other DNA
gggctcccgacaaggtgcccg

SEQ ID NO: 32399 - DNA, 21 bp, synthetic construct
  source 1..21: mol_type = other DNA; mol_type = other DNA
ggagggggtacgagctcatgg

SEQ ID NO: 32400 - DNA, 21 bp, synthetic construct
  source 1..21: mol_type = other DNA; mol_type = other DNA
tggtcccgcgttggtgtaaac

SEQ ID NO: 32401 - DNA, 21 bp, synthetic construct
  source 1..21: mol_type = other DNA; mol_type = other DNA
gacccgggtgatcgcaaatgg

SEQ ID NO: 32402 - DNA, 21 bp, synthetic construct
  source 1..21: mol_type = other DNA; mol_type = other DNA
atcatgggcgaccgcatatgg

SEQ ID NO: 32403 - DNA, 21 bp, synthetic construct
  source 1..21: mol_type = other DNA; mol_type = other DNA
aatgatgggagctgtaaggct

SEQ ID NO: 32404 - DNA, 21 bp, synthetic construct
  source 1..21: mol_type = other DNA; mol_type = other DNA
cgtacgtacgaaacatatcct

SEQ ID NO: 32405 - DNA, 21 bp, synthetic construct
  source 1..21: mol_type = other DNA; mol_type = other DNA
agggacgggaacagcatctgg

SEQ ID NO: 32406 - DNA, 21 bp, synthetic construct
  source 1..21: mol_type = other DNA; mol_type = other DNA
aaatccgatcatgtcaggtgg

SEQ ID NO: 32407 - DNA, 21 bp, synthetic construct
  source 1..21: mol_type = other DNA; mol_type = other DNA
aaggacgggtcgtgcaaggcc

SEQ ID NO: 32408 - DNA, 21 bp, synthetic construct
  source 1..21: mol_type = other DNA; mol_type = other DNA
tgtaataagccaatgacaaat

SEQ ID NO: 32409 - DNA, 21 bp, synthetic construct
  source 1..21: mol_type = other DNA; mol_type = other DNA
tattcccggataggcccgata

SEQ ID NO: 32410 - DNA, 21 bp, synthetic construct
  source 1..21: mol_type = other DNA; mol_type = other DNA
aaagatgactttgtgtatttt

SEQ ID NO: 32411 - DNA, 21 bp, synthetic construct
  source 1..21: mol_type = other DNA; mol_type = other DNA
aggtctgagtttacaggattc

SEQ ID NO: 32412 - DNA, 21 bp, synthetic construct
  source 1..21: mol_type = other DNA; mol_type = other DNA
tacagccgtaacggattaaat

SEQ ID NO: 32413 - DNA, 21 bp, synthetic construct
  source 1..21: mol_type = other DNA; mol_type = other DNA
tactggacaggcatgcacgaa

SEQ ID NO: 32414 - DNA, 21 bp, synthetic construct
  source 1..21: mol_type = other DNA; mol_type = other DNA
atagtgagcaccaatggagtt

SEQ ID NO: 32415 - DNA, 21 bp, synthetic construct
  source 1..21: mol_type = other DNA; mol_type = other DNA
aggacttatgagacctacccc

SEQ ID NO: 32416 - DNA, 21 bp, synthetic construct
  source 1..21: mol_type = other DNA; mol_type = other DNA
tatgtcaagagcgataaagtg

SEQ ID NO: 32417 - DNA, 21 bp, synthetic construct
  source 1..21: mol_type = other DNA; mol_type = other DNA
ttaagcgctctctccgtgaat

SEQ ID NO: 32418 - DNA, 21 bp, synthetic construct
  source 1..21: mol_type = other DNA; mol_type = other DNA
tttgcgagatcgggttttaac

SEQ ID NO: 32419 - DNA, 21 bp, synthetic construct
  source 1..21: mol_type = other DNA; mol_type = other DNA
tgtacatcgaaaactcagcat

SEQ ID NO: 32420 - DNA, 21 bp, synthetic construct
  source 1..21: mol_type = other DNA; mol_type = other DNA
tactggagtggcagaactgaa

SEQ ID NO: 32421 - DNA, 21 bp, synthetic construct
  source 1..21: mol_type = other DNA; mol_type = other DNA
tctatgcctgaccgctcgtgg

SEQ ID NO: 32422 - DNA, 21 bp, synthetic construct
  source 1..21: mol_type = other DNA; mol_type = other DNA
tattggcacggagtcacagag

SEQ ID NO: 32423 - DNA, 21 bp, synthetic construct
  source 1..21: mol_type = other DNA; mol_type = other DNA
tgtaagattgcgtcagtgccg

SEQ ID NO: 32424 - DNA, 21 bp, synthetic construct
  source 1..21: mol_type = other DNA; mol_type = other DNA
aggaatggaacctcttcgtgg

SEQ ID NO: 32425 - DNA, 21 bp, synthetic construct
  source 1..21: mol_type = other DNA; mol_type = other DNA
tacctcaagtcgcagttctac

SEQ ID NO: 32426 - DNA, 21 bp, synthetic construct
  source 1..21: mol_type = other DNA; mol_type = other DNA
tgcaaacctggaaatgcggct

SEQ ID NO: 32427 - DNA, 21 bp, synthetic construct
  source 1..21: mol_type = other DNA; mol_type = other DNA
agtttagcagatcgcggatgg

SEQ ID NO: 32428 - DNA, 21 bp, synthetic construct
  source 1..21: mol_type = other DNA; mol_type = other DNA
caagacggaacctcttattgg

SEQ ID NO: 32429 - DNA, 21 bp, synthetic construct
  source 1..21: mol_type = other DNA; mol_type = other DNA
tttagtcgagccggcatgaac

SEQ ID NO: 32430 - DNA, 21 bp, synthetic construct
  source 1..21: mol_type = other DNA; mol_type = other DNA
cacacgatcgactctttccct

SEQ ID NO: 32431 - DNA, 21 bp, synthetic construct
  source 1..21: mol_type = other DNA; mol_type = other DNA
attaagagcggagagggttgt

SEQ ID NO: 32432 - DNA, 21 bp, synthetic construct
  source 1..21: mol_type = other DNA; mol_type = other DNA
agaaacgactataactatccc

SEQ ID NO: 32433 - DNA, 21 bp, synthetic construct
  source 1..21: mol_type = other DNA; mol_type = other DNA
agagagcaggaggtgcgctgg

SEQ ID NO: 32434 - DNA, 21 bp, synthetic construct
  source 1..21: mol_type = other DNA; mol_type = other DNA
ttcgctcgcacaggaatcaat

SEQ ID NO: 32435 - DNA, 21 bp, synthetic construct
  source 1..21: mol_type = other DNA; mol_type = other DNA
tacgaaccgggctgcaaatca

SEQ ID NO: 32436 - DNA, 21 bp, synthetic construct
  source 1..21: mol_type = other DNA; mol_type = other DNA
gattacgcctatagcaaagaa

SEQ ID NO: 32437 - DNA, 21 bp, synthetic construct
  source 1..21: mol_type = other DNA; mol_type = other DNA
tattcgcgagtcaaccataac

SEQ ID NO: 32438 - DNA, 21 bp, synthetic construct
  source 1..21: mol_type = other DNA; mol_type = other DNA
tgcaacaagccaatgatggcg

SEQ ID NO: 32439 - DNA, 21 bp, synthetic construct
  source 1..21: mol_type = other DNA; mol_type = other DNA
tacgtcagatcaggtccgccc

SEQ ID NO: 32440 - DNA, 21 bp, synthetic construct
  source 1..21: mol_type = other DNA; mol_type = other DNA
ctcgccaaggcaggttttaat

SEQ ID NO: 32441 - DNA, 21 bp, synthetic construct
  source 1..21: mol_type = other DNA; mol_type = other DNA
tatttccagggaaagatagcc

SEQ ID NO: 32442 - DNA, 21 bp, synthetic construct
  source 1..21: mol_type = other DNA; mol_type = other DNA
tgcaataatagcggctatagc

SEQ ID NO: 32443 - DNA, 21 bp, synthetic construct
  source 1..21: mol_type = other DNA; mol_type = other DNA
tactggagtgggacggcggct

SEQ ID NO: 32444 - DNA, 21 bp, synthetic construct
  source 1..21: mol_type = other DNA; mol_type = other DNA
tatagccgagcgaacaacaat

SEQ ID NO: 32445 - DNA, 21 bp, synthetic construct
  source 1..21: mol_type = other DNA; mol_type = other DNA
aacagcccggcatgcaaggcc

SEQ ID NO: 32446 - DNA, 21 bp, synthetic construct
  source 1..21: mol_type = other DNA; mol_type = other DNA
tatactagtactaacgggata

SEQ ID NO: 32447 - DNA, 21 bp, synthetic construct
  source 1..21: mol_type = other DNA; mol_type = other DNA
tacggggtgggcacctggtca

SEQ ID NO: 32448 - DNA, 21 bp, synthetic construct
  source 1..21: mol_type = other DNA; mol_type = other DNA
caagacgggtattcgagttgg

SEQ ID NO: 32449 - DNA, 21 bp, synthetic construct
  source 1..21: mol_type = other DNA; mol_type = other DNA
tatagtaaggtgaattttaac

SEQ ID NO: 32450 - DNA, 21 bp, synthetic construct
  source 1..21: mol_type = other DNA; mol_type = other DNA
tataccaaattggatccacat

SEQ ID NO: 32451 - DNA, 21 bp, synthetic construct
  source 1..21: mol_type = other DNA; mol_type = other DNA
ggtgcagatggagtgagatgg

SEQ ID NO: 32452 - DNA, 21 bp, synthetic construct
  source 1..21: mol_type = other DNA; mol_type = other DNA
acatactccactaatggcatc

SEQ ID NO: 32453 - DNA, 21 bp, synthetic construct
  source 1..21: mol_type = other DNA; mol_type = other DNA
tattttagtaagcaaatagca

SEQ ID NO: 32454 - DNA, 21 bp, synthetic construct
  source 1..21: mol_type = other DNA; mol_type = other DNA
ctccggaacgggaccccagcg

SEQ ID NO: 32455 - DNA, 21 bp, synthetic construct
  source 1..21: mol_type = other DNA; mol_type = other DNA
tatacgagactggacgtactc

SEQ ID NO: 32456 - DNA, 21 bp, synthetic construct
  source 1..21: mol_type = other DNA; mol_type = other DNA
tactcaaggcaaggtgcaaac

SEQ ID NO: 32457 - DNA, 21 bp, synthetic construct
  source 1..21: mol_type = other DNA; mol_type = other DNA
tatagcaagcagggacaaaat

SEQ ID NO: 32458 - DNA, 21 bp, synthetic construct
  source 1..21: mol_type = other DNA; mol_type = other DNA
tacgctcgcctgtccccgttg

SEQ ID NO: 32459 - DNA, 21 bp, synthetic construct
  source 1..21: mol_type = other DNA; mol_type = other DNA
aggaacggcaccagcagctgg

SEQ ID NO: 32460 - DNA, 21 bp, synthetic construct
  source 1..21: mol_type = other DNA; mol_type = other DNA
tatctgaagagccaaagtatc

SEQ ID NO: 32461 - DNA, 21 bp, synthetic construct
  source 1..21: mol_type = other DNA; mol_type = other DNA
ggtagtgagtttaaatcatgg

SEQ ID NO: 32462 - DNA, 21 bp, synthetic construct
  source 1..21: mol_type = other DNA; mol_type = other DNA
tactactctggacgcttggaa

SEQ ID NO: 32463 - DNA, 21 bp, synthetic construct
  source 1..21: mol_type = other DNA; mol_type = other DNA
ggatgtggaacaaaagatggg

SEQ ID NO: 32464 - DNA, 21 bp, synthetic construct
  source 1..21: mol_type = other DNA; mol_type = other DNA
ggcaaaacaggacctgattgt

SEQ ID NO: 32465 - DNA, 21 bp, synthetic construct
  source 1..21: mol_type = other DNA; mol_type = other DNA
aaggacggggtatcgtcatgg

SEQ ID NO: 32466 - DNA, 21 bp, synthetic construct
  source 1..21: mol_type = other DNA; mol_type = other DNA
tacagccgaaccggaaataat

SEQ ID NO: 32467 - DNA, 21 bp, synthetic construct
  source 1..21: mol_type = other DNA; mol_type = other DNA
tattacacgggtgtgttggaa

SEQ ID NO: 32468 - DNA, 21 bp, synthetic construct
  source 1..21: mol_type = other DNA; mol_type = other DNA
aagtcggaccacgtgcgatgg

SEQ ID NO: 32469 - DNA, 21 bp, synthetic construct
  source 1..21: mol_type = other DNA; mol_type = other DNA
cgcacgccagacagctattgt

SEQ ID NO: 32470 - DNA, 21 bp, synthetic construct
  source 1..21: mol_type = other DNA; mol_type = other DNA
tacttctctaggcagatcgat

SEQ ID NO: 32471 - DNA, 21 bp, synthetic construct
  source 1..21: mol_type = other DNA
ccggtagaatcacgaacctgg

SEQ ID NO: 32472 - DNA, 21 bp, synthetic construct
  source 1..21: mol_type = other DNA
tatgaaagtacaaatgggatc

SEQ ID NO: 32473 - DNA, 21 bp, synthetic construct
  source 1..21: mol_type = other DNA; mol_type = other DNA
aaagatggattaagtcgctgg

SEQ ID NO: 32474 - DNA, 21 bp, synthetic construct
  source 1..21: mol_type = other DNA; mol_type = other DNA
aagtctgatgagtgtaagcct

SEQ ID NO: 32475 - DNA, 21 bp, synthetic construct
  source 1..21: mol_type = other DNA; mol_type = other DNA
atgacaaagacgtcatgcctt

SEQ ID NO: 32476 - DNA, 21 bp, synthetic construct
  source 1..21: mol_type = other DNA; mol_type = other DNA
tgtaaggcagatagtaggatt

SEQ ID NO: 32477 - DNA, 21 bp, synthetic construct
  source 1..21: mol_type = other DNA; mol_type = other DNA
tatttctctggtctacgtgct

SEQ ID NO: 32478 - DNA, 21 bp, synthetic construct
  source 1..21: mol_type = other DNA; mol_type = other DNA
tattctaggataaatacgaac

SEQ ID NO: 32479 - DNA, 21 bp, synthetic construct
  source 1..21: mol_type = other DNA; mol_type = other DNA
ttaagtaagatgggaccgaat

SEQ ID NO: 32480 - DNA, 21 bp, synthetic construct
  source 1..21: mol_type = other DNA; mol_type = other DNA
tgctggaaaccaatgacggct

SEQ ID NO: 32481 - DNA, 21 bp, synthetic construct
  source 1..21: mol_type = other DNA; mol_type = other DNA
tatagcaaatttaactacaat

SEQ ID NO: 32482 - DNA, 21 bp, synthetic construct
  source 1..21: mol_type = other DNA; mol_type = other DNA
gccatgggtgaccgtggatgg

SEQ ID NO: 32483 - DNA, 21 bp, synthetic construct
  source 1..21: mol_type = other DNA; mol_type = other DNA
atagagtcatataatggtaga

SEQ ID NO: 32484 - DNA, 21 bp, synthetic construct
  source 1..21: mol_type = other DNA; mol_type = other DNA
tattacacgggaaggacgaac

SEQ ID NO: 32485 - DNA, 21 bp, synthetic construct
  source 1..21: mol_type = other DNA; mol_type = other DNA
tacgtgaaaacagacatgtac

SEQ ID NO: 32486 - DNA, 21 bp, synthetic construct
  source 1..21: mol_type = other DNA; mol_type = other DNA
tacaaagccactgaaccttgt

SEQ ID NO: 32487 - DNA, 21 bp, synthetic construct
  source 1..21: mol_type = other DNA; mol_type = other DNA
tcgatgcaggaccgaagttgg

SEQ ID NO: 32488 - DNA, 21 bp, synthetic construct
  source 1..21: mol_type = other DNA; mol_type = other DNA
gacagtgcttctcgggcttgg

SEQ ID NO: 32489 - DNA, 21 bp, synthetic construct
  source 1..21: mol_type = other DNA; mol_type = other DNA
tacgccagaacaaattttaat

SEQ ID NO: 32490 - DNA, 21 bp, synthetic construct
  source 1..21: mol_type = other DNA; mol_type = other DNA
ggtggagagtttcggcactgg

SEQ ID NO: 32491 - DNA, 21 bp, synthetic construct
  source 1..21: mol_type = other DNA; mol_type = other DNA
attaaggggagttgcgagcag

SEQ ID NO: 32492 - DNA, 21 bp, synthetic construct
  source 1..21: mol_type = other DNA; mol_type = other DNA
tacttcacccacaagctagat

SEQ ID NO: 32493 - DNA, 21 bp, synthetic construct
  source 1..21: mol_type = other DNA; mol_type = other DNA
ttacaccgactccatcctgat

SEQ ID NO: 32494 - DNA, 21 bp, synthetic construct
  source 1..21: mol_type = other DNA; mol_type = other DNA
agggagggtaattcattatgg

SEQ ID NO: 32495 - DNA, 21 bp, synthetic construct
  source 1..21: mol_type = other DNA; mol_type = other DNA
tgcaagagtcaatcctcgcag

SEQ ID NO: 32496 - DNA, 21 bp, synthetic construct
  source 1..21: mol_type = other DNA; mol_type = other DNA
tgtaaagtaaagagcggagaa

SEQ ID NO: 32497 - DNA, 21 bp, synthetic construct
  source 1..21: mol_type = other DNA; mol_type = other DNA
tacgtaaagtcccagctagta

SEQ ID NO: 32498 - DNA, 21 bp, synthetic construct
  source 1..21: mol_type = other DNA; mol_type = other DNA
tggcagtccacaaatggtatg

SEQ ID NO: 32499 - DNA, 21 bp, synthetic construct
  source 1..21: mol_type = other DNA; mol_type = other DNA
tttggagagttcaagtgtgag

SEQ ID NO: 32500 - DNA, 21 bp, synthetic construct
  source 1..21: mol_type = other DNA; mol_type = other DNA
tattccagagccggatacaat

SEQ ID NO: 32501 - DNA, 21 bp, synthetic construct
  source 1..21: mol_type = other DNA; mol_type = other DNA
ttctctcgtacggggatgaat

SEQ ID NO: 32502 - DNA, 21 bp, synthetic construct
  source 1..21: mol_type = other DNA; mol_type = other DNA
tacacacgtttggacaacatg

SEQ ID NO: 32503 - DNA, 21 bp, synthetic construct
  source 1..21: mol_type = other DNA; mol_type = other DNA
atggacggtgtctgcaaagga

SEQ ID NO: 32504 - DNA, 21 bp, synthetic construct
  source 1..21: mol_type = other DNA; mol_type = other DNA
cttttgagctccgccgattgg

SEQ ID NO: 32505 - DNA, 21 bp, synthetic construct
  source 1..21: mol_type = other DNA; mol_type = other DNA
tgcaaagctgtgtcgcacgat

SEQ ID NO: 32506 - DNA, 21 bp, synthetic construct
  source 1..21: mol_type = other DNA; mol_type = other DNA
ctctcgaggctgggtccaatc

SEQ ID NO: 32507 - DNA, 21 bp, synthetic construct
  source 1..21: mol_type = other DNA; mol_type = other DNA
tttattaagcacgatacaaaa

SEQ ID NO: 32508 - DNA, 21 bp, synthetic construct
  source 1..21: mol_type = other DNA; mol_type = other DNA
taccacgcgaagtctacaaat

SEQ ID NO: 32509 - DNA, 21 bp, synthetic construct
  source 1..21: mol_type = other DNA; mol_type = other DNA
tgcgactctaagacaggacat

SEQ ID NO: 32510 - DNA, 21 bp, synthetic construct
  source 1..21: mol_type = other DNA; mol_type = other DNA
tattatagcggcgttattgaa

SEQ ID NO: 32511 - DNA, 21 bp, synthetic construct
  source 1..21: mol_type = other DNA; mol_type = other DNA
tacgctagaggcggtacgaac

SEQ ID NO: 32512 - DNA, 21 bp, synthetic construct
  source 1..21: mol_type = other DNA; mol_type = other DNA
tgcgggaaaagggatgcagat

SEQ ID NO: 32513 - DNA, 21 bp, synthetic construct
  source 1..21: mol_type = other DNA; mol_type = other DNA
tattttagccgacaaattgac

SEQ ID NO: 32514 - DNA, 21 bp, synthetic construct
  source 1..21: mol_type = other DNA; mol_type = other DNA
tgcaaaccccccatggcaccg

SEQ ID NO: 32515 - DNA, 21 bp, synthetic construct
  source 1..21: mol_type = other DNA; mol_type = other DNA
ttggcgcgcggagggtatgat

SEQ ID NO: 32516 - DNA, 21 bp, synthetic construct
  source 1..21: mol_type = other DNA; mol_type = other DNA
ggaagtcccggtagtgcgtgg

SEQ ID NO: 32517 - DNA, 21 bp, synthetic construct
  source 1..21: mol_type = other DNA; mol_type = other DNA
tgcaagcctgcgccaggtgag

SEQ ID NO: 32518 - DNA, 21 bp, synthetic construct
  source 1..21: mol_type = other DNA; mol_type = other DNA
tcgtacgccttttccagggag

SEQ ID NO: 32519 - DNA, 21 bp, synthetic construct
  source 1..21: mol_type = other DNA
tggtggtcgggagttggggcg

SEQ ID NO: 32520 - DNA, 21 bp, synthetic construct
  source 1..21: mol_type = other DNA; mol_type = other DNA
tttgcacgttcagggtacaat

SEQ ID NO: 32521 - DNA, 21 bp, synthetic construct
  source 1..21: mol_type = other DNA; mol_type = other DNA
tattcgcgccaaggtcagaat

SEQ ID NO: 32522 - DNA, 21 bp, synthetic construct
  source 1..21: mol_type = other DNA; mol_type = other DNA
tgcaaatttcccacaaaggag

SEQ ID NO: 32523 - DNA, 21 bp, synthetic construct
  source 1..21: mol_type = other DNA; mol_type = other DNA
tggacgccagcctgcaaagcg

SEQ ID NO: 32524 - DNA, 21 bp, synthetic construct
  source 1..21: mol_type = other DNA; mol_type = other DNA
aaagatggcgtcagcagctgg

SEQ ID NO: 32525 - DNA, 21 bp, synthetic construct
  source 1..21: mol_type = other DNA; mol_type = other DNA
ctcccgcgaacaggtaactgg

SEQ ID NO: 32526 - DNA, 21 bp, synthetic construct
  source 1..21: mol_type = other DNA; mol_type = other DNA
tatcaaaaggagcaacagtgt

SEQ ID NO: 32527 - DNA, 21 bp, synthetic construct
  source 1..21: mol_type = other DNA; mol_type = other DNA
cgaagcatagatgccttccct

SEQ ID NO: 32528 - DNA, 21 bp, synthetic construct
  source 1..21: mol_type = other DNA; mol_type = other DNA
tatgccaggggtggcagcaat

SEQ ID NO: 32529 - DNA, 21 bp, synthetic construct
  source 1..21: mol_type = other DNA; mol_type = other DNA
tgtaagccgccgatgccgccc

SEQ ID NO: 32530 - DNA, 21 bp, synthetic construct
  source 1..21: mol_type = other DNA; mol_type = other DNA
acctggaaggggccgccttgt

SEQ ID NO: 32531 - DNA, 21 bp, synthetic construct
  source 1..21: mol_type = other DNA; mol_type = other DNA
ggctgcaggaagggggacata

SEQ ID NO: 32532 - DNA, 21 bp, synthetic construct
  source 1..21: mol_type = other DNA; mol_type = other DNA
tattttagcgggttacgtgac

SEQ ID NO: 32533 - DNA, 21 bp, synthetic construct
  source 1..21: mol_type = other DNA; mol_type = other DNA
tatttccacggacaattggcc

SEQ ID NO: 32534 - DNA, 21 bp, synthetic construct
  source 1..21: mol_type = other DNA; mol_type = other DNA
tatcataggctttcaaataac

SEQ ID NO: 32535 - DNA, 21 bp, synthetic construct
  source 1..21: mol_type = other DNA; mol_type = other DNA
ctcagccggccgtgctcagag

SEQ ID NO: 32536 - DNA, 21 bp, synthetic construct
  source 1..21: mol_type = other DNA; mol_type = other DNA
gtcctgcagtcgtccagctgg

SEQ ID NO: 32537 - DNA, 21 bp, synthetic construct
  source 1..21: mol_type = other DNA; mol_type = other DNA
tgttcaaaggagacgatgagt

SEQ ID NO: 32538 - DNA, 21 bp, synthetic construct
  source 1..21: mol_type = other DNA; mol_type = other DNA
tatagtcggggcaatccaaat

SEQ ID NO: 32539 - DNA, 21 bp, synthetic construct
  source 1..21: mol_type = other DNA; mol_type = other DNA
tactggagccagattaaggat

SEQ ID NO: 32540 - DNA, 21 bp, synthetic construct
  source 1..21: mol_type = other DNA; mol_type = other DNA
ttatgtaagccatgtgggact

SEQ ID NO: 32541 - DNA, 21 bp, synthetic construct
  source 1..21: mol_type = other DNA; mol_type = other DNA
tatttcacagctattatcgag

SEQ ID NO: 32542 - DNA, 21 bp, synthetic construct
  source 1..21: mol_type = other DNA; mol_type = other DNA
tatgcaaggttgaatccaaac

SEQ ID NO: 32543 - DNA, 21 bp, synthetic construct
  source 1..21: mol_type = other DNA; mol_type = other DNA
tacgtaaggtcaggtaccaat

SEQ ID NO: 32544 - DNA, 21 bp, synthetic construct
  source 1..21: mol_type = other DNA; mol_type = other DNA
tactctaggatcaatcacaat

SEQ ID NO: 32545 - DNA, 21 bp, synthetic construct
  source 1..21: mol_type = other DNA; mol_type = other DNA
tacttcagcgggcttcacgca

SEQ ID NO: 32546 - DNA, 21 bp, synthetic construct
  source 1..21: mol_type = other DNA; mol_type = other DNA
ttcaaaagtacgaatggggtt

SEQ ID NO: 32547 - DNA, 21 bp, synthetic construct
  source 1..21: mol_type = other DNA; mol_type = other DNA
tatgcgaagctcggatataat

SEQ ID NO: 32548 - DNA, 21 bp, synthetic construct
  source 1..21: mol_type = other DNA; mol_type = other DNA
tacttctcaggtgtcaccgga

SEQ ID NO: 32549 - DNA, 21 bp, synthetic construct
  source 1..21: mol_type = other DNA; mol_type = other DNA
tatttcacaggcgtgcatcca

SEQ ID NO: 32550 - DNA, 21 bp, synthetic construct
  source 1..21: mol_type = other DNA; mol_type = other DNA
tattgggcaggaaagatggag

SEQ ID NO: 32551 - DNA, 21 bp, synthetic construct
  source 1..21: mol_type = other DNA; mol_type = other DNA
tattcgaggatctcgagtaat

SEQ ID NO: 32552 - DNA, 21 bp, synthetic construct
  source 1..21: mol_type = other DNA; mol_type = other DNA
tactaccacggaatacaagca

SEQ ID NO: 32553 - DNA, 21 bp, synthetic construct
  source 1..21: mol_type = other DNA; mol_type = other DNA
tgcttaggtaagtgtcaggga

SEQ ID NO: 32554 - DNA, 21 bp, synthetic construct
  source 1..21: mol_type = other DNA; mol_type = other DNA
acttacactggcgacccggcc

SEQ ID NO: 32555 - DNA, 21 bp, synthetic construct
  source 1..21: mol_type = other DNA; mol_type = other DNA
tacagtcgtcagggactgaac

SEQ ID NO: 32556 - DNA, 21 bp, synthetic construct
  source 1..21: mol_type = other DNA; mol_type = other DNA
ctcagtaaagcagccacaaat

SEQ ID NO: 32557 - DNA, 21 bp, synthetic construct
  source 1..21: mol_type = other DNA; mol_type = other DNA
ctcgcgaaaaacgggcacaat

SEQ ID NO: 32558 - DNA, 21 bp, synthetic construct
  source 1..21: mol_type = other DNA; mol_type = other DNA
ctcaccagactgcacgccgta

SEQ ID NO: 32559 - DNA, 21 bp, synthetic construct
  source 1..21: mol_type = other DNA; mol_type = other DNA
tactcaaggatggggaccaat

SEQ ID NO: 32560 - DNA, 21 bp, synthetic construct
  source 1..21: mol_type = other DNA; mol_type = other DNA
ctcagtcgcgcaggacgtgac

SEQ ID NO: 32561 - DNA, 21 bp, synthetic construct
  source 1..21: mol_type = other DNA; mol_type = other DNA
ggcggaccggggtcggcttgg

SEQ ID NO: 32562 - DNA, 21 bp, synthetic construct
  source 1..21: mol_type = other DNA; mol_type = other DNA
caactggatagccgtgactgg

SEQ ID NO: 32563 - DNA, 21 bp, synthetic construct
  source 1..21: mol_type = other DNA; mol_type = other DNA
tattggcagggcattcctgct

SEQ ID NO: 32564 - DNA, 21 bp, synthetic construct
  source 1..21: mol_type = other DNA; mol_type = other DNA
ttcccaccactcttcgcggcc

SEQ ID NO: 32565 - DNA, 21 bp, synthetic construct
  source 1..21: mol_type = other DNA; mol_type = other DNA
tacgtccgtagcgattgtgca

SEQ ID NO: 32566 - DNA, 21 bp, synthetic construct
  source 1..21: mol_type = other DNA; mol_type = other DNA
tggactgaagggaccaaatac

SEQ ID NO: 32567 - DNA, 21 bp, synthetic construct
  source 1..21: mol_type = other DNA; mol_type = other DNA
tatttcgccggtaaacaagag

SEQ ID NO: 32568 - DNA, 21 bp, synthetic construct
  source 1..21: mol_type = other DNA; mol_type = other DNA
ggaggggaattcagacattgg

SEQ ID NO: 32569 - DNA, 21 bp, synthetic construct
  source 1..21: mol_type = other DNA; mol_type = other DNA
tacagccgtaatggagcgaac

SEQ ID NO: 32570 - DNA, 21 bp, synthetic construct
  source 1..21: mol_type = other DNA; mol_type = other DNA
cgcttgtatgatagctacgct

SEQ ID NO: 32571 - DNA, 21 bp, synthetic construct
  source 1..21: mol_type = other DNA; mol_type = other DNA
tatagcaggttaaaccataac

SEQ ID NO: 32572 - DNA, 21 bp, synthetic construct
  source 1..21: mol_type = other DNA; mol_type = other DNA
tattttactaacgtcagagaa

SEQ ID NO: 32573 - DNA, 21 bp, synthetic construct
  source 1..21: mol_type = other DNA; mol_type = other DNA
tattttagcggggaacgggcc

SEQ ID NO: 32574 - DNA, 21 bp, synthetic construct
  source 1..21: mol_type = other DNA; mol_type = other DNA
tatacccgtctggatgttctt

SEQ ID NO: 32575 - DNA, 21 bp, synthetic construct
  source 1..21: mol_type = other DNA; mol_type = other DNA
tatgtgcgttcaggtggcggc

SEQ ID NO: 32576 - DNA, 21 bp, synthetic construct
  source 1..21: mol_type = other DNA; mol_type = other DNA
ttttcgagggcaaatgtaaac

SEQ ID NO: 32577 - DNA, 21 bp, synthetic construct
  source 1..21: mol_type = other DNA; mol_type = other DNA
tactcgcgactgcatcagttg

SEQ ID NO: 32578 - DNA, 21 bp, synthetic construct
  source 1..21: mol_type = other DNA; mol_type = other DNA
tgtaataagccaatggaagcc

SEQ ID NO: 32579 - DNA, 21 bp, synthetic construct
  source 1..21: mol_type = other DNA; mol_type = other DNA
gttggttctgaccgaggatgg

SEQ ID NO: 32580 - DNA, 21 bp, synthetic construct
  source 1..21: mol_type = other DNA; mol_type = other DNA
agaaacgctacttctgcctgg

SEQ ID NO: 32581 - DNA, 21 bp, synthetic construct
  source 1..21: mol_type = other DNA; mol_type = other DNA
aaaacaaagagtgaatgtgat

SEQ ID NO: 32582 - DNA, 21 bp, synthetic construct
  source 1..21: mol_type = other DNA; mol_type = other DNA
ctaagtcgtcttacggtaaac

SEQ ID NO: 32583 - DNA, 21 bp, synthetic construct
  source 1..21: mol_type = other DNA; mol_type = other DNA
tattctcgggggaacatcaac

SEQ ID NO: 32584 - DNA, 21 bp, synthetic construct
  source 1..21: mol_type = other DNA; mol_type = other DNA
ggcgaggagggtgttcgctgg

SEQ ID NO: 32585 - DNA, 21 bp, synthetic construct
  source 1..21: mol_type = other DNA; mol_type = other DNA
tgcaaaccaggcgctacgagt

SEQ ID NO: 32586 - DNA, 21 bp, synthetic construct
  source 1..21: mol_type = other DNA; mol_type = other DNA
tgttcaccctatttgcatgaa

SEQ ID NO: 32587 - DNA, 21 bp, synthetic construct
  source 1..21: mol_type = other DNA; mol_type = other DNA
cgggatataacggtcttcccc

SEQ ID NO: 32588 - DNA, 21 bp, synthetic construct
  source 1..21: mol_type = other DNA; mol_type = other DNA
tttgacggttattccgcgtac

SEQ ID NO: 32589 - DNA, 21 bp, synthetic construct
  source 1..21: mol_type = other DNA; mol_type = other DNA
tattggcaagggatgctagac

SEQ ID NO: 32590 - DNA, 21 bp, synthetic construct
  source 1..21: mol_type = other DNA; mol_type = other DNA
tacttctccggggtggctatg

SEQ ID NO: 32591 - DNA, 21 bp, synthetic construct
  source 1..21: mol_type = other DNA; mol_type = other DNA
cacgatagtacaaatggtatc

SEQ ID NO: 32592 - DNA, 21 bp, synthetic construct
  source 1..21: mol_type = other DNA; mol_type = other DNA
aggctctacgactcttatgcg

SEQ ID NO: 32593 - DNA, 21 bp, synthetic construct
  source 1..21: mol_type = other DNA; mol_type = other DNA
tactgggagggtgttagggag

SEQ ID NO: 32594 - DNA, 21 bp, synthetic construct
  source 1..21: mol_type = other DNA; mol_type = other DNA
tactttactggacatccagaa

SEQ ID NO: 32595 - DNA, 21 bp, synthetic construct
  source 1..21: mol_type = other DNA; mol_type = other DNA
gacatgtcgactcgcacttgg

SEQ ID NO: 32596 - DNA, 21 bp, synthetic construct
  source 1..21: mol_type = other DNA; mol_type = other DNA
caaggtgaggcgcgaatttgg

SEQ ID NO: 32597 - DNA, 21 bp, synthetic construct
  source 1..21: mol_type = other DNA; mol_type = other DNA
ggaggcgcgggtgttcgttgg

SEQ ID NO: 32598 - DNA, 21 bp, synthetic construct
  source 1..21: mol_type = other DNA; mol_type = other DNA
tgtaacaagccgatgacagta

SEQ ID NO: 32599 - DNA, 21 bp, synthetic construct
  source 1..21: mol_type = other DNA; mol_type = other DNA
tattcccgcatcaattcgaac

SEQ ID NO: 32600 - DNA, 21 bp, synthetic construct
  source 1..21: mol_type = other DNA; mol_type = other DNA
tactcgagacacggccagaac

SEQ ID NO: 32601 - DNA, 21 bp, synthetic construct
  source 1..21: mol_type = other DNA; mol_type = other DNA
tatgccaagcaaggtatgaat

SEQ ID NO: 32602 - DNA, 21 bp, synthetic construct
  source 1..21: mol_type = other DNA; mol_type = other DNA
ggatgtaagccagattttggg

SEQ ID NO: 32603 - DNA, 21 bp, synthetic construct
  source 1..21: mol_type = other DNA; mol_type = other DNA
aggagctacgacacatacccc

SEQ ID NO: 32604 - DNA, 21 bp, synthetic construct
  source 1..21: mol_type = other DNA; mol_type = other DNA
tattacacaggacacgtaaat

SEQ ID NO: 32605 - DNA, 21 bp, synthetic construct
  source 1..21: mol_type = other DNA; mol_type = other DNA
tatgcccggcaaagtaacaat

SEQ ID NO: 32606 - DNA, 21 bp, synthetic construct
  source 1..21: mol_type = other DNA; mol_type = other DNA
cgcggggatgatcggggatgg

SEQ ID NO: 32607 - DNA, 21 bp, synthetic construct
  source 1..21: mol_type = other DNA; mol_type = other DNA
tattcccgtcaaaataccaat

SEQ ID NO: 32608 - DNA, 21 bp, synthetic construct
  source 1..21: mol_type = other DNA; mol_type = other DNA
tattgggaaggagtaaagtca

SEQ ID NO: 32609 - DNA, 21 bp, synthetic construct
  source 1..21: mol_type = other DNA; mol_type = other DNA
cgtccggaaacttgcccacga

SEQ ID NO: 32610 - DNA, 21 bp, synthetic construct
  source 1..21: mol_type = other DNA; mol_type = other DNA
tgcaaacctaagtgtacgccc

SEQ ID NO: 32611 - DNA, 21 bp, synthetic construct
  source 1..21: mol_type = other DNA; mol_type = other DNA
tacgcaaagcttggatacaac

SEQ ID NO: 32612 - DNA, 21 bp, synthetic construct
  source 1..21: mol_type = other DNA; mol_type = other DNA
ctgaaagatgggacaaatgca

SEQ ID NO: 32613 - DNA, 21 bp, synthetic construct
  source 1..21: mol_type = other DNA; mol_type = other DNA
tactggaccggtatgcccgag

SEQ ID NO: 32614 - DNA, 21 bp, synthetic construct
  source 1..21: mol_type = other DNA; mol_type = other DNA
atgaccggtacaagttgtttc

SEQ ID NO: 32615 - DNA, 21 bp, synthetic construct
  source 1..21: mol_type = other DNA; mol_type = other DNA
tgcaaagacactaaaacggtt

SEQ ID NO: 32616 - DNA, 21 bp, synthetic construct
  source 1..21: mol_type = other DNA; mol_type = other DNA
ttcagccgcgctaacttcaac

SEQ ID NO: 32617 - DNA, 21 bp, synthetic construct
  source 1..21: mol_type = other DNA; mol_type = other DNA
tactcgaggaatagtcctaat

SEQ ID NO: 32618 - DNA, 21 bp, synthetic construct
  source 1..21: mol_type = other DNA; mol_type = other DNA
gtacggggcgaggataggtgt

SEQ ID NO: 32619 - DNA, 21 bp, synthetic construct
  source 1..21: mol_type = other DNA; mol_type = other DNA
cgtgacgagttctcttcatgg

SEQ ID NO: 32620 - DNA, 21 bp, synthetic construct
  source 1..21: mol_type = other DNA; mol_type = other DNA
tggccaaatggggtggacgga

SEQ ID NO: 32621 - DNA, 21 bp, synthetic construct
  source 1..21: mol_type = other DNA; mol_type = other DNA
cgtagtgaatttgcaacattc

SEQ ID NO: 32622 - DNA, 21 bp, synthetic construct
  source 1..21: mol_type = other DNA; mol_type = other DNA
tattcccgtaacgggatgaac

SEQ ID NO: 32623 - DNA, 21 bp, synthetic construct
  source 1..21: mol_type = other DNA
tatgtgcgacacgatgtacac

SEQ ID NO: 32624 - DNA, 21 bp, synthetic construct
  source 1..21: mol_type = other DNA; mol_type = other DNA
tgcaaaccctcaaagctccca

SEQ ID NO: 32625 - DNA, 21 bp, synthetic construct
  source 1..21: mol_type = other DNA; mol_type = other DNA
tttttttcgggaatccaagag

SEQ ID NO: 32626 - DNA, 21 bp, synthetic construct
  source 1..21: mol_type = other DNA; mol_type = other DNA
tacagtagatccgggcaaaac

SEQ ID NO: 32627 - DNA, 21 bp, synthetic construct
  source 1..21: mol_type = other DNA; mol_type = other DNA
ttatgtaggccttgctcaatt

SEQ ID NO: 32628 - DNA, 21 bp, synthetic construct
  source 1..21: mol_type = other DNA; mol_type = other DNA
ccaggctctactaacggtcgc

SEQ ID NO: 32629 - DNA, 21 bp, synthetic construct
  source 1..21: mol_type = other DNA; mol_type = other DNA
taccacaggataggggttaat

SEQ ID NO: 32630 - DNA, 21 bp, synthetic construct
  source 1..21: mol_type = other DNA; mol_type = other DNA
tatagtcgctccggcaataac

SEQ ID NO: 32631 - DNA, 21 bp, synthetic construct
  source 1..21: mol_type = other DNA; mol_type = other DNA
tatagcaaatggaatgaaaat

SEQ ID NO: 32632 - DNA, 21 bp, synthetic construct
  source 1..21: mol_type = other DNA; mol_type = other DNA
tattatactggacaaactgag

SEQ ID NO: 32633 - DNA, 21 bp, synthetic construct
  source 1..21: mol_type = other DNA; mol_type = other DNA
tacttcgagggtagaatagca

SEQ ID NO: 32634 - DNA, 21 bp, synthetic construct
  source 1..21: mol_type = other DNA; mol_type = other DNA
tggtattcgggagttaaggct

SEQ ID NO: 32635 - DNA, 21 bp, synthetic construct
  source 1..21: mol_type = other DNA; mol_type = other DNA
tgtcgctcggagaccaaactc

SEQ ID NO: 32636 - DNA, 21 bp, synthetic construct
  source 1..21: mol_type = other DNA; mol_type = other DNA
aggatggaggatcacggctgg

SEQ ID NO: 32637 - DNA, 21 bp, synthetic construct
  source 1..21: mol_type = other DNA; mol_type = other DNA
atgcagagtacaaacggagta

SEQ ID NO: 32638 - DNA, 21 bp, synthetic construct
  source 1..21: mol_type = other DNA; mol_type = other DNA
ctttctaagatgaatcataat

SEQ ID NO: 32639 - DNA, 21 bp, synthetic construct
  source 1..21: mol_type = other DNA; mol_type = other DNA
ttgaatcggccatgcagtgaa

SEQ ID NO: 32640 - DNA, 21 bp, synthetic construct
  source 1..21: mol_type = other DNA; mol_type = other DNA
tacttttcgggtacttatcag

SEQ ID NO: 32641 - DNA, 21 bp, synthetic construct
  source 1..21: mol_type = other DNA; mol_type = other DNA
tatagcaggcataatgacaac

SEQ ID NO: 32642 - DNA, 21 bp, synthetic construct
  source 1..21: mol_type = other DNA; mol_type = other DNA
tattcgagacagggggataat

SEQ ID NO: 32643 - DNA, 21 bp, synthetic construct
  source 1..21: mol_type = other DNA; mol_type = other DNA
tggatgcctatgtgcaaggct

SEQ ID NO: 32644 - DNA, 21 bp, synthetic construct
  source 1..21: mol_type = other DNA; mol_type = other DNA
tatgccaggcagggcgagaat

SEQ ID NO: 32645 - DNA, 21 bp, synthetic construct
  source 1..21: mol_type = other DNA; mol_type = other DNA
atgtcagaattcaaaagctgg

SEQ ID NO: 32646 - DNA, 21 bp, synthetic construct
  source 1..21: mol_type = other DNA; mol_type = other DNA
atgcatagattaagcgaacgg

SEQ ID NO: 32647 - DNA, 21 bp, synthetic construct
  source 1..21: mol_type = other DNA; mol_type = other DNA
cggggggaattcgttatgttc

SEQ ID NO: 32648 - DNA, 21 bp, synthetic construct
  source 1..21: mol_type = other DNA; mol_type = other DNA
agaccggagacatgtcctatt

SEQ ID NO: 32649 - DNA, 21 bp, synthetic construct
  source 1..21: mol_type = other DNA; mol_type = other DNA
tacttcgctggcgtaatcgaa

SEQ ID NO: 32650 - DNA, 21 bp, synthetic construct
  source 1..21: mol_type = other DNA; mol_type = other DNA
ataccaattaaatgtcccagc

SEQ ID NO: 32651 - DNA, 21 bp, synthetic construct
  source 1..21: mol_type = other DNA; mol_type = other DNA
tttcagtcgactaatggcatt

SEQ ID NO: 32652 - DNA, 21 bp, synthetic construct
  source 1..21: mol_type = other DNA; mol_type = other DNA
gtcgccggcaagggatgcgga

SEQ ID NO: 32653 - DNA, 21 bp, synthetic construct
  source 1..21: mol_type = other DNA; mol_type = other DNA
tatgacagcaccaatggcatc

SEQ ID NO: 32654 - DNA, 21 bp, synthetic construct
  source 1..21: mol_type = other DNA; mol_type = other DNA
tgcaaagagggctctgcgtgg

SEQ ID NO: 32655 - DNA, 21 bp, synthetic construct
  source 1..21: mol_type = other DNA; mol_type = other DNA
tgtacgcgtctttcggccccg

SEQ ID NO: 32656 - DNA, 21 bp, synthetic construct
  source 1..21: mol_type = other DNA; mol_type = other DNA
tatttcagtggtgtcagcgat

SEQ ID NO: 32657 - DNA, 21 bp, synthetic construct
  source 1..21: mol_type = other DNA; mol_type = other DNA
accgatgattatagtaagtgg

SEQ ID NO: 32658 - DNA, 21 bp, synthetic construct
  source 1..21: mol_type = other DNA; mol_type = other DNA
cctttcgcgaagagcccgatg

SEQ ID NO: 32659 - DNA, 21 bp, synthetic construct
  source 1..21: mol_type = other DNA; mol_type = other DNA
tatgctaaattggggtacaac

SEQ ID NO: 32660 - DNA, 21 bp, synthetic construct
  source 1..21: mol_type = other DNA; mol_type = other DNA
atattgcaagatcgcggctgg

SEQ ID NO: 32661 - DNA, 21 bp, synthetic construct
  source 1..21: mol_type = other DNA; mol_type = other DNA
tactggaccgggagagcagac

SEQ ID NO: 32662 - DNA, 21 bp, synthetic construct
  source 1..21: mol_type = other DNA; mol_type = other DNA
tgtaagccgtcgcccttagaa

SEQ ID NO: 32663 - DNA, 21 bp, synthetic construct
  source 1..21: mol_type = other DNA; mol_type = other DNA
tacgcacgttcgaaccctaac

SEQ ID NO: 32664 - DNA, 21 bp, synthetic construct
  source 1..21: mol_type = other DNA; mol_type = other DNA
ttctggtccggaaaattggac

SEQ ID NO: 32665 - DNA, 21 bp, synthetic construct
  source 1..21: mol_type = other DNA; mol_type = other DNA
ttttttacaggaatgcgcgat

SEQ ID NO: 32666 - DNA, 21 bp, synthetic construct
  source 1..21: mol_type = other DNA; mol_type = other DNA
gcacactctaccaacggtgtg

SEQ ID NO: 32667 - DNA, 21 bp, synthetic construct
  source 1..21: mol_type = other DNA; mol_type = other DNA
cctaattccactaacggagta

SEQ ID NO: 32668 - DNA, 21 bp, synthetic construct
  source 1..21: mol_type = other DNA; mol_type = other DNA
ttggccgcctcctgttgcgta

SEQ ID NO: 32669 - DNA, 21 bp, synthetic construct
  source 1..21: mol_type = other DNA; mol_type = other DNA
tacagtagggttgatgataga

SEQ ID NO: 32670 - DNA, 21 bp, synthetic construct
  source 1..21: mol_type = other DNA; mol_type = other DNA
gtgccccttagaggaatagga

SEQ ID NO: 32671 - DNA, 21 bp, synthetic construct
  source 1..21: mol_type = other DNA; mol_type = other DNA
agacttggccaaacctgtgct

SEQ ID NO: 32672 - DNA, 21 bp, synthetic construct
  source 1..21: mol_type = other DNA; mol_type = other DNA
tacgcccgccatggctttaat

SEQ ID NO: 32673 - DNA, 21 bp, synthetic construct
  source 1..21: mol_type = other DNA; mol_type = other DNA
gtcccagaaagggtgtgcggt

SEQ ID NO: 32674 - DNA, 21 bp, synthetic construct
  source 1..21: mol_type = other DNA; mol_type = other DNA
tactcaaaacacaacgagaac

SEQ ID NO: 32675 - DNA, 21 bp, synthetic construct
  source 1..21: mol_type = other DNA; mol_type = other DNA
ttctggtctggaacaaaggaa

SEQ ID NO: 32676 - DNA, 21 bp, synthetic construct
  source 1..21: mol_type = other DNA; mol_type = other DNA
taccatcgcatcggccctaac

SEQ ID NO: 32677 - DNA, 21 bp, synthetic construct
  source 1..21: mol_type = other DNA; mol_type = other DNA
gtagctcgcacgggatgggac

SEQ ID NO: 32678 - DNA, 21 bp, synthetic construct
  source 1..21: mol_type = other DNA; mol_type = other DNA
tatgtgcgaagtcagccgcaa

SEQ ID NO: 32679 - DNA, 21 bp, synthetic construct
  source 1..21: mol_type = other DNA; mol_type = other DNA
tgcaaacctcccaagttggag

SEQ ID NO: 32680 - DNA, 21 bp, synthetic construct
  source 1..21: mol_type = other DNA; mol_type = other DNA
tacttctccggccagcagagc

SEQ ID NO: 32681 - DNA, 21 bp, synthetic construct
  source 1..21: mol_type = other DNA; mol_type = other DNA
tgtaaattgagtagtacaccg

SEQ ID NO: 32682 - DNA, 21 bp, synthetic construct
  source 1..21: mol_type = other DNA; mol_type = other DNA
cgcgacgggaatagtatgtgg

SEQ ID NO: 32683 - DNA, 21 bp, synthetic construct
  source 1..21: mol_type = other DNA; mol_type = other DNA
tgcaagcctgataaggtggga

SEQ ID NO: 32684 - DNA, 21 bp, synthetic construct
  source 1..21: mol_type = other DNA; mol_type = other DNA
ttatccaaggttggcgataat

SEQ ID NO: 32685 - DNA, 21 bp, synthetic construct
  source 1..21: mol_type = other DNA; mol_type = other DNA
ttttcgcgaatcggcgacaat

SEQ ID NO: 32686 - DNA, 21 bp, synthetic construct
  source 1..21: mol_type = other DNA; mol_type = other DNA
tacagtcgaaccaatacaaac

SEQ ID NO: 32687 - DNA, 21 bp, synthetic construct
  source 1..21: mol_type = other DNA; mol_type = other DNA
tatacaaagttaaacgataat

SEQ ID NO: 32688 - DNA, 21 bp, synthetic construct
  source 1..21: mol_type = other DNA; mol_type = other DNA
tgtaagccttactcacgcgag

SEQ ID NO: 32689 - DNA, 21 bp, synthetic construct
  source 1..21: mol_type = other DNA; mol_type = other DNA
cggagtgagacagtttacgtg

SEQ ID NO: 32690 - DNA, 21 bp, synthetic construct
  source 1..21: mol_type = other DNA; mol_type = other DNA
cgaacccccacgtgtcccggt

SEQ ID NO: 32691 - DNA, 21 bp, synthetic construct
  source 1..21: mol_type = other DNA; mol_type = other DNA
tacgcgagaatcggcgtcaac

SEQ ID NO: 32692 - DNA, 21 bp, synthetic construct
  source 1..21: mol_type = other DNA; mol_type = other DNA
ctaagccgtagcggaaataac

SEQ ID NO: 32693 - DNA, 21 bp, synthetic construct
  source 1..21: mol_type = other DNA; mol_type = other DNA
aagttcgataacacatgctcg

SEQ ID NO: 32694 - DNA, 21 bp, synthetic construct
  source 1..21: mol_type = other DNA; mol_type = other DNA
tactggagcggtaaggcggcc

SEQ ID NO: 32695 - DNA, 21 bp, synthetic construct
  source 1..21: mol_type = other DNA; mol_type = other DNA
taccatcgcttagacgctatg

SEQ ID NO: 32696 - DNA, 21 bp, synthetic construct
  source 1..21: mol_type = other DNA; mol_type = other DNA
tactcaaagctccatacacac

SEQ ID NO: 32697 - DNA, 21 bp, synthetic construct
  source 1..21: mol_type = other DNA; mol_type = other DNA
tattcaaaaaatgggtttaat

SEQ ID NO: 32698 - DNA, 21 bp, synthetic construct
  source 1..21: mol_type = other DNA; mol_type = other DNA
ttccacaggagcacgcctaac

SEQ ID NO: 32699 - DNA, 21 bp, synthetic construct
  source 1..21: mol_type = other DNA; mol_type = other DNA
gtcatggaggaccgtaggtgg

SEQ ID NO: 32700 - DNA, 21 bp, synthetic construct
  source 1..21: mol_type = other DNA; mol_type = other DNA
tattggagcggcaagcaatcg

SEQ ID NO: 32701 - DNA, 21 bp, synthetic construct
  source 1..21: mol_type = other DNA; mol_type = other DNA
tgcaaggtatcagcttcagca

SEQ ID NO: 32702 - DNA, 21 bp, synthetic construct
  source 1..21: mol_type = other DNA; mol_type = other DNA
ggaggagatggttctacctgg

SEQ ID NO: 32703 - DNA, 21 bp, synthetic construct
  source 1..21: mol_type = other DNA; mol_type = other DNA
cggggaggcgatgtttttccc

SEQ ID NO: 32704 - DNA, 21 bp, synthetic construct
  source 1..21: mol_type = other DNA; mol_type = other DNA
taccgacctggttgcatcggt

SEQ ID NO: 32705 - DNA, 21 bp, synthetic construct
  source 1..21: mol_type = other DNA; mol_type = other DNA
ggagcggggacgagtaagtgg

SEQ ID NO: 32706 - DNA, 21 bp, synthetic construct
  source 1..21: mol_type = other DNA; mol_type = other DNA
tactggagcggaaagcaagct

SEQ ID NO: 32707 - DNA, 21 bp, synthetic construct
  source 1..21: mol_type = other DNA; mol_type = other DNA
gggtcgatttcgtctacgtgg

SEQ ID NO: 32708 - DNA, 21 bp, synthetic construct
  source 1..21: mol_type = other DNA; mol_type = other DNA
aggatgcttgacgtattccca

SEQ ID NO: 32709 - DNA, 21 bp, synthetic construct
  source 1..21: mol_type = other DNA; mol_type = other DNA
ccctggcgagactgtacgaag

SEQ ID NO: 32710 - DNA, 21 bp, synthetic construct
  source 1..21: mol_type = other DNA; mol_type = other DNA
tatagcaggcataatactaac

SEQ ID NO: 32711 - DNA, 21 bp, synthetic construct
  source 1..21: mol_type = other DNA; mol_type = other DNA
tatgcgcgcaccaacgtaaac

SEQ ID NO: 32712 - DNA, 21 bp, synthetic construct
  source 1..21: mol_type = other DNA; mol_type = other DNA
tggttttcaggcaaattagat

SEQ ID NO: 32713 - DNA, 21 bp, synthetic construct
  source 1..21: mol_type = other DNA; mol_type = other DNA
ctccataggcttcacgccgac

SEQ ID NO: 32714 - DNA, 21 bp, synthetic construct
  source 1..21: mol_type = other DNA; mol_type = other DNA
attaaagctatgataaaacag

SEQ ID NO: 32715 - DNA, 21 bp, synthetic construct
  source 1..21: mol_type = other DNA; mol_type = other DNA
ttcagtagactcgggactaat

SEQ ID NO: 32716 - DNA, 21 bp, synthetic construct
  source 1..21: mol_type = other DNA; mol_type = other DNA
ttctggaccggtaaggtagaa

SEQ ID NO: 32717 - DNA, 21 bp, synthetic construct
  source 1..21: mol_type = other DNA; mol_type = other DNA
cgcgaagaagaggtgtttccc

SEQ ID NO: 32718 - DNA, 21 bp, synthetic construct
  source 1..21: mol_type = other DNA; mol_type = other DNA
ttagcaaggatgggtgtgaac

SEQ ID NO: 32719 - DNA, 21 bp, synthetic construct
  source 1..21: mol_type = other DNA; mol_type = other DNA
cgagaacccggcgtggcatgg

SEQ ID NO: 32720 - DNA, 21 bp, synthetic construct
  source 1..21: mol_type = other DNA; mol_type = other DNA
tactcacgagtgggtagtcat

SEQ ID NO: 32721 - DNA, 21 bp, synthetic construct
  source 1..21: mol_type = other DNA; mol_type = other DNA
tactgggcaggggtccaggag

SEQ ID NO: 32722 - DNA, 21 bp, synthetic construct
  source 1..21: mol_type = other DNA; mol_type = other DNA
agtgcaccgacttgtaaaggg

SEQ ID NO: 32723 - DNA, 21 bp, synthetic construct
  source 1..21: mol_type = other DNA; mol_type = other DNA
tacagtaagtataacattaat

SEQ ID NO: 32724 - DNA, 21 bp, synthetic construct
  source 1..21: mol_type = other DNA; mol_type = other DNA
ggaggaatcggctcagcatgg

SEQ ID NO: 32725 - DNA, 21 bp, synthetic construct
  source 1..21: mol_type = other DNA; mol_type = other DNA
tgtcgagaggggacgactgct

SEQ ID NO: 32726 - DNA, 21 bp, synthetic construct
  source 1..21: mol_type = other DNA; mol_type = other DNA
tattttactggtgtccagcca

SEQ ID NO: 32727 - DNA, 21 bp, synthetic construct
  source 1..21: mol_type = other DNA; mol_type = other DNA
ttttttaccggaaagttggat

SEQ ID NO: 32728 - DNA, 21 bp, synthetic construct
  source 1..21: mol_type = other DNA; mol_type = other DNA
acggatggtaccagtctctgg

SEQ ID NO: 32729 - DNA, 21 bp, synthetic construct
  source 1..21: mol_type = other DNA; mol_type = other DNA
gggggagcgactagcaattgg

SEQ ID NO: 32730 - DNA, 21 bp, synthetic construct
  source 1..21: mol_type = other DNA; mol_type = other DNA
tactggtcaggaaccaccgat

SEQ ID NO: 32731 - DNA, 21 bp, synthetic construct
  source 1..21: mol_type = other DNA; mol_type = other DNA
cggtccatggtagggtgtgat

SEQ ID NO: 32732 - DNA, 21 bp, synthetic construct
  source 1..21: mol_type = other DNA; mol_type = other DNA
tacagcagggcgaacagcaac

SEQ ID NO: 32733 - DNA, 21 bp, synthetic construct
  source 1..21: mol_type = other DNA; mol_type = other DNA
ttacatcgagatagcccaaat

SEQ ID NO: 32734 - DNA, 21 bp, synthetic construct
  source 1..21: mol_type = other DNA; mol_type = other DNA
cactggagctcaaacggggtt

SEQ ID NO: 32735 - DNA, 21 bp, synthetic construct
  source 1..21: mol_type = other DNA; mol_type = other DNA
tacagtagacataatgtgaat

SEQ ID NO: 32736 - DNA, 21 bp, synthetic construct
  source 1..21: mol_type = other DNA; mol_type = other DNA
ttttggtcgggaaaaatcgac

SEQ ID NO: 32737 - DNA, 21 bp, synthetic construct
  source 1..21: mol_type = other DNA; mol_type = other DNA
tatagtcgctcgggaatgaat

SEQ ID NO: 32738 - DNA, 21 bp, synthetic construct
  source 1..21: mol_type = other DNA; mol_type = other DNA
tactataccggacgtcatgac

SEQ ID NO: 32739 - DNA, 21 bp, synthetic construct
  source 1..21: mol_type = other DNA; mol_type = other DNA
gtggacagcagcaacggggtc

SEQ ID NO: 32740 - DNA, 21 bp, synthetic construct
  source 1..21: mol_type = other DNA; mol_type = other DNA
atgttcgatggaacagaagct

SEQ ID NO: 32741 - DNA, 21 bp, synthetic construct
  source 1..21: mol_type = other DNA; mol_type = other DNA
atggacggtcaatcgttgtgg

SEQ ID NO: 32742 - DNA, 21 bp, synthetic construct
  source 1..21: mol_type = other DNA; mol_type = other DNA
tattattccggggtaaaatat

SEQ ID NO: 32743 - DNA, 21 bp, synthetic construct
  source 1..21: mol_type = other DNA; mol_type = other DNA
tattggcatggaattccggaa

SEQ ID NO: 32744 - DNA, 21 bp, synthetic construct
  source 1..21: mol_type = other DNA; mol_type = other DNA
tactttcacggacagatggat

SEQ ID NO: 32745 - DNA, 21 bp, synthetic construct
  source 1..21: mol_type = other DNA; mol_type = other DNA
tactatacgggtgtcaaaggc

SEQ ID NO: 32746 - DNA, 21 bp, synthetic construct
  source 1..21: mol_type = other DNA; mol_type = other DNA
tcaggggactccaacaaatgt

SEQ ID NO: 32747 - DNA, 21 bp, synthetic construct
  source 1..21: mol_type = other DNA; mol_type = other DNA
ggttcatcaacgagtgtctgg

SEQ ID NO: 32748 - DNA, 21 bp, synthetic construct
  source 1..21: mol_type = other DNA; mol_type = other DNA
tacgcaaaagttggatggaat

SEQ ID NO: 32749 - DNA, 21 bp, synthetic construct
  source 1..21: mol_type = other DNA; mol_type = other DNA
aaaggattagagggtatggac

SEQ ID NO: 32750 - DNA, 21 bp, synthetic construct
  source 1..21: mol_type = other DNA; mol_type = other DNA
caaaacgatcacgtgcgatgg

SEQ ID NO: 32751 - DNA, 21 bp, synthetic construct
  source 1..21: mol_type = other DNA; mol_type = other DNA
ctttcgagattaaccgtgaat

SEQ ID NO: 32752 - DNA, 21 bp, synthetic construct
  source 1..21: mol_type = other DNA; mol_type = other DNA
ttacataagaagatgccagac

SEQ ID NO: 32753 - DNA, 21 bp, synthetic construct
  source 1..21: mol_type = other DNA; mol_type = other DNA
tacgcgagagtgggtaacaac

SEQ ID NO: 32754 - DNA, 21 bp, synthetic construct
  source 1..21: mol_type = other DNA; mol_type = other DNA
aaagacgattggaatagcttc

SEQ ID NO: 32755 - DNA, 21 bp, synthetic construct
  source 1..21: mol_type = other DNA; mol_type = other DNA
cccctccgtgactgcgtaaaa

SEQ ID NO: 32756 - DNA, 21 bp, synthetic construct
  source 1..21: mol_type = other DNA; mol_type = other DNA
tttggtggaaggtgcccagag

SEQ ID NO: 32757 - DNA, 21 bp, synthetic construct
  source 1..21: mol_type = other DNA; mol_type = other DNA
tattggcaaggagtacgcgaa

SEQ ID NO: 32758 - DNA, 21 bp, synthetic construct
  source 1..21: mol_type = other DNA; mol_type = other DNA
gggagtggcacgagtaattgg

SEQ ID NO: 32759 - DNA, 21 bp, synthetic construct
  source 1..21: mol_type = other DNA; mol_type = other DNA
tactggtcaggaacgaatgat

SEQ ID NO: 32760 - DNA, 21 bp, synthetic construct
  source 1..21: mol_type = other DNA; mol_type = other DNA
tactcccgagattgtgagaac

SEQ ID NO: 32761 - DNA, 21 bp, synthetic construct
  source 1..21: mol_type = other DNA; mol_type = other DNA
aacgctcgagaaggaagaaat

SEQ ID NO: 32762 - DNA, 21 bp, synthetic construct
  source 1..21: mol_type = other DNA; mol_type = other DNA
tatttctcaggggtgagagga

SEQ ID NO: 32763 - DNA, 21 bp, synthetic construct
  source 1..21: mol_type = other DNA; mol_type = other DNA
tactggtccggaatgaacgcg

SEQ ID NO: 32764 - DNA, 21 bp, synthetic construct
  source 1..21: mol_type = other DNA; mol_type = other DNA
tgcaagccacagagcggctgg

SEQ ID NO: 32765 - DNA, 21 bp, synthetic construct
  source 1..21: mol_type = other DNA; mol_type = other DNA
tacgttaggcatgacgtgcat

SEQ ID NO: 32766 - DNA, 21 bp, synthetic construct
  source 1..21: mol_type = other DNA; mol_type = other DNA
tgcaagcccttatgcaagccg

SEQ ID NO: 32767 - DNA, 21 bp, synthetic construct
  source 1..21: mol_type = other DNA; mol_type = other DNA
acccaaaggcctggagagtgt

SEQ ID NO: 32768 - DNA, 21 bp, synthetic construct
  source 1..21: mol_type = other DNA; mol_type = other DNA
cgcgatgcgtttacaagtttt

SEQ ID NO: 32769 - DNA, 21 bp, synthetic construct
  source 1..21: mol_type = other DNA; mol_type = other DNA
cgtgacgaatacgttatgtac

SEQ ID NO: 32770 - DNA, 21 bp, synthetic construct
  source 1..21: mol_type = other DNA; mol_type = other DNA
tgcaataaaaggagtggggag

SEQ ID NO: 32771 - DNA, 21 bp, synthetic construct
  source 1..21: mol_type = other DNA; mol_type = other DNA
tgtaagacgcagcgaccagac

SEQ ID NO: 32772 - DNA, 21 bp, synthetic construct
  source 1..21: mol_type = other DNA; mol_type = other DNA
tacttcagcggcttgcgagag

SEQ ID NO: 32773 - DNA, 21 bp, synthetic construct
  source 1..21: mol_type = other DNA; mol_type = other DNA
ggtgggtcggggtcaagttgg

SEQ ID NO: 32774 - DNA, 21 bp, synthetic construct
  source 1..21: mol_type = other DNA; mol_type = other DNA
tactccagacaggggcaaaac

SEQ ID NO: 32775 - DNA, 21 bp, synthetic construct
  source 1..21: mol_type = other DNA; mol_type = other DNA
tatagtaaaatgggtgataat

SEQ ID NO: 32776 - DNA, 21 bp, synthetic construct
  source 1..21: mol_type = other DNA; mol_type = other DNA
tactggcaagggaaggtagca

SEQ ID NO: 32777 - DNA, 21 bp, synthetic construct
  source 1..21: mol_type = other DNA; mol_type = other DNA
tgcacgtcgaataccgggcat

SEQ ID NO: 32778 - DNA, 21 bp, synthetic construct
  source 1..21: mol_type = other DNA; mol_type = other DNA
gccgatggcagctgtaaagct

SEQ ID NO: 32779 - DNA, 21 bp, synthetic construct
  source 1..21: mol_type = other DNA; mol_type = other DNA
aattacgcaaggtccgcagag

SEQ ID NO: 32780 - DNA, 21 bp, synthetic construct
  source 1..21: mol_type = other DNA; mol_type = other DNA
ttttccagggctaacataaat

SEQ ID NO: 32781 - DNA, 21 bp, synthetic construct
  source 1..21: mol_type = other DNA; mol_type = other DNA
tgcactagtaaaacagggatt

SEQ ID NO: 32782 - DNA, 21 bp, synthetic construct
  source 1..21: mol_type = other DNA; mol_type = other DNA
tactttcacggacagttagaa

SEQ ID NO: 32783 - DNA, 21 bp, synthetic construct
  source 1..21: mol_type = other DNA; mol_type = other DNA
tatgcgagaggaggcatcaac

SEQ ID NO: 32784 - DNA, 21 bp, synthetic construct
  source 1..21: mol_type = other DNA; mol_type = other DNA
tactggagcggacatcaagct

SEQ ID NO: 32785 - DNA, 21 bp, synthetic construct
  source 1..21: mol_type = other DNA; mol_type = other DNA
tatacaaaggcccagatgaac

SEQ ID NO: 32786 - DNA, 21 bp, synthetic construct
  source 1..21: mol_type = other DNA; mol_type = other DNA
tacagccgcaagggtgaaaac

SEQ ID NO: 32787 - DNA, 21 bp, synthetic construct
  source 1..21: mol_type = other DNA; mol_type = other DNA
ctagcgaaacttggccctaat

SEQ ID NO: 32788 - DNA, 21 bp, synthetic construct
  source 1..21: mol_type = other DNA; mol_type = other DNA
atcaagaataatgccgactgt

SEQ ID NO: 32789 - DNA, 21 bp, synthetic construct
  source 1..21: mol_type = other DNA; mol_type = other DNA
tatgctagaggcaacacgaat

SEQ ID NO: 32790 - DNA, 21 bp, synthetic construct
  source 1..21: mol_type = other DNA; mol_type = other DNA
tgtagggagggcacaccgccg

SEQ ID NO: 32791 - DNA, 21 bp, synthetic construct
  source 1..21: mol_type = other DNA; mol_type = other DNA
ggtgacgaatgtgtcaaagct

SEQ ID NO: 32792 - DNA, 21 bp, synthetic construct
  source 1..21: mol_type = other DNA; mol_type = other DNA
tgtaacaaacctgacacggca

SEQ ID NO: 32793 - DNA, 21 bp, synthetic construct
  source 1..21: mol_type = other DNA; mol_type = other DNA
tacgccaggcaaggctataac

SEQ ID NO: 32794 - DNA, 21 bp, synthetic construct
  source 1..21: mol_type = other DNA; mol_type = other DNA
ctgtccaaaatggggccaaac

SEQ ID NO: 32795 - DNA, 21 bp, synthetic construct
  source 1..21: mol_type = other DNA; mol_type = other DNA
tgtatgccccaagccgggaga

SEQ ID NO: 32796 - DNA, 21 bp, synthetic construct
  source 1..21: mol_type = other DNA; mol_type = other DNA
tattggacaggacaagtagct

SEQ ID NO: 32797 - DNA, 21 bp, synthetic construct
  source 1..21: mol_type = other DNA; mol_type = other DNA
tgtaggtccgggccaacacca

SEQ ID NO: 32798 - DNA, 21 bp, synthetic construct
  source 1..21: mol_type = other DNA; mol_type = other DNA
tttttcactggattcattgat

SEQ ID NO: 32799 - DNA, 21 bp, synthetic construct
  source 1..21: mol_type = other DNA; mol_type = other DNA
tatttctcgggcgtcacggtc

SEQ ID NO: 32800 - DNA, 21 bp, synthetic construct
  source 1..21: mol_type = other DNA; mol_type = other DNA
tacgtacggagcgaccttgcc

SEQ ID NO: 32801 - DNA, 21 bp, synthetic construct
  source 1..21: mol_type = other DNA; mol_type = other DNA
tataccaggcttagttatgat

SEQ ID NO: 32802 - DNA, 21 bp, synthetic construct
  source 1..21: mol_type = other DNA; mol_type = other DNA
tattcgcgatggaatgaaaat

SEQ ID NO: 32803 - DNA, 21 bp, synthetic construct
  source 1..21: mol_type = other DNA; mol_type = other DNA
atcaagggctcgtgtgaacag

SEQ ID NO: 32804 - DNA, 21 bp, synthetic construct
  source 1..21: mol_type = other DNA; mol_type = other DNA
tactacactggaaagtgcgag

SEQ ID NO: 32805 - DNA, 21 bp, synthetic construct
  source 1..21: mol_type = other DNA; mol_type = other DNA
tacttcagtggtatgacagaa

SEQ ID NO: 32806 - DNA, 21 bp, synthetic construct
  source 1..21: mol_type = other DNA; mol_type = other DNA
ttcttcacaggctacattgat

SEQ ID NO: 32807 - DNA, 21 bp, synthetic construct
  source 1..21: mol_type = other DNA; mol_type = other DNA
tgtaagccaggccagccgatg

SEQ ID NO: 32808 - DNA, 21 bp, synthetic construct
  source 1..21: mol_type = other DNA; mol_type = other DNA
tattcaaggaacggtacgaat

SEQ ID NO: 32809 - DNA, 21 bp, synthetic construct
  source 1..21: mol_type = other DNA; mol_type = other DNA
tattggagcgggcagcgagag

SEQ ID NO: 32810 - DNA, 21 bp, synthetic construct
  source 1..21: mol_type = other DNA; mol_type = other DNA
tgcgcaccattgtacagggag

SEQ ID NO: 32811 - DNA, 21 bp, synthetic construct
  source 1..21: mol_type = other DNA; mol_type = other DNA
aggtctgagtttcaggtattt

SEQ ID NO: 32812 - DNA, 21 bp, synthetic construct
  source 1..21: mol_type = other DNA; mol_type = other DNA
tgtgctccatacatccacgag

SEQ ID NO: 32813 - DNA, 21 bp, synthetic construct
  source 1..21: mol_type = other DNA; mol_type = other DNA
tgtgcgccttataagcatgaa

SEQ ID NO: 32814 - DNA, 21 bp, synthetic construct
  source 1..21: mol_type = other DNA; mol_type = other DNA
agagaagacgaagtctactgg

SEQ ID NO: 32815 - DNA, 21 bp, synthetic construct
  source 1..21: mol_type = other DNA; mol_type = other DNA
tacagtcgagaaggaccgaac

SEQ ID NO: 32816 - DNA, 21 bp, synthetic construct
  source 1..21: mol_type = other DNA; mol_type = other DNA
tactcaagatcaggctacaac

SEQ ID NO: 32817 - DNA, 21 bp, synthetic construct
  source 1..21: mol_type = other DNA; mol_type = other DNA
tatgcgaagggagggaataac

SEQ ID NO: 32818 - DNA, 21 bp, synthetic construct
  source 1..21: mol_type = other DNA; mol_type = other DNA
tgcacagcgaaaacgggacac

SEQ ID NO: 32819 - DNA, 21 bp, synthetic construct
  source 1..21: mol_type = other DNA; mol_type = other DNA
atcgaaagcagtagaagttgg

SEQ ID NO: 32820 - DNA, 21 bp, synthetic construct
  source 1..21: mol_type = other DNA; mol_type = other DNA
gtcccggattcagtacgctgg

SEQ ID NO: 32821 - DNA, 21 bp, synthetic construct
  source 1..21: mol_type = other DNA; mol_type = other DNA
tgtaagccaaggaccatggag

SEQ ID NO: 32822 - DNA, 21 bp, synthetic construct
  source 1..21: mol_type = other DNA; mol_type = other DNA
tacgcaagaatgggcatgaac

SEQ ID NO: 32823 - DNA, 21 bp, synthetic construct
  source 1..21: mol_type = other DNA; mol_type = other DNA
tttcacagacttcttctagac

SEQ ID NO: 32824 - DNA, 21 bp, synthetic construct
  source 1..21: mol_type = other DNA; mol_type = other DNA
gttaaatcgtcaaatggagtg

SEQ ID NO: 32825 - DNA, 21 bp, synthetic construct
  source 1..21: mol_type = other DNA; mol_type = other DNA
ttttggtcgggcgtccctgcc

SEQ ID NO: 32826 - DNA, 21 bp, synthetic construct
  source 1..21: mol_type = other DNA; mol_type = other DNA
tacagccgccagggctttaac

SEQ ID NO: 32827 - DNA, 21 bp, synthetic construct
  source 1..21: mol_type = other DNA; mol_type = other DNA
ggcggtgctacgtccaactgg

SEQ ID NO: 32828 - DNA, 21 bp, synthetic construct
  source 1..21: mol_type = other DNA; mol_type = other DNA
tgcaaggagggatcgtcgtgg

SEQ ID NO: 32829 - DNA, 21 bp, synthetic construct
  source 1..21: mol_type = other DNA; mol_type = other DNA
aggggtgacggaaactattgg

SEQ ID NO: 32830 - DNA, 21 bp, synthetic construct
  source 1..21: mol_type = other DNA; mol_type = other DNA
atctgcagtaagcttcaaccg

SEQ ID NO: 32831 - DNA, 21 bp, synthetic construct
  source 1..21: mol_type = other DNA; mol_type = other DNA
cggggtggaaacgtctacccg

SEQ ID NO: 32832 - DNA, 21 bp, synthetic construct
  source 1..21: mol_type = other DNA; mol_type = other DNA
agggaagagaacgtctattgg

SEQ ID NO: 32833 - DNA, 21 bp, synthetic construct
  source 1..21: mol_type = other DNA; mol_type = other DNA
aggtctgaattccacggttat

SEQ ID NO: 32834 - DNA, 21 bp, synthetic construct
  source 1..21: mol_type = other DNA; mol_type = other DNA
tgtaagccacctagcagagaa

SEQ ID NO: 32835 - DNA, 21 bp, synthetic construct
  source 1..21: mol_type = other DNA; mol_type = other DNA
ctttccaggctcggcatcgac

SEQ ID NO: 32836 - DNA, 21 bp, synthetic construct
  source 1..21: mol_type = other DNA; mol_type = other DNA
tattcgcggctatcacaggac

SEQ ID NO: 32837 - DNA, 21 bp, synthetic construct
  source 1..21: mol_type = other DNA; mol_type = other DNA
gatatgagcaccaggacgtgg

SEQ ID NO: 32838 - DNA, 21 bp, synthetic construct
  source 1..21: mol_type = other DNA; mol_type = other DNA
attggagtaaaggggtgggac

SEQ ID NO: 32839 - DNA, 21 bp, synthetic construct
  source 1..21: mol_type = other DNA; mol_type = other DNA
tatgagccggggtgtaaaaat

SEQ ID NO: 32840 - DNA, 21 bp, synthetic construct
  source 1..21: mol_type = other DNA; mol_type = other DNA
tattcccggtcgaataataat

SEQ ID NO: 32841 - DNA, 21 bp, synthetic construct
  source 1..21: mol_type = other DNA; mol_type = other DNA
tacttctcaaatgtaagagag

SEQ ID NO: 32842 - DNA, 21 bp, synthetic construct
  source 1..21: mol_type = other DNA; mol_type = other DNA
aattacgcaaagagctacgcc

SEQ ID NO: 32843 - DNA, 21 bp, synthetic construct
  source 1..21: mol_type = other DNA; mol_type = other DNA
tgcaaacctggatggggagag

SEQ ID NO: 32844 - DNA, 21 bp, synthetic construct
  source 1..21: mol_type = other DNA; mol_type = other DNA
tatcataaacttaatcccggg

SEQ ID NO: 32845 - DNA, 21 bp, synthetic construct
  source 1..21: mol_type = other DNA; mol_type = other DNA
agagagggcactcctcactgt

SEQ ID NO: 32846 - DNA, 21 bp, synthetic construct
  source 1..21: mol_type = other DNA
ttctttactggccggatggac

SEQ ID NO: 32847 - DNA, 21 bp, synthetic construct
  source 1..21: mol_type = other DNA; mol_type = other DNA
tacctcaagagtgacgcatac

SEQ ID NO: 32848 - DNA, 21 bp, synthetic construct
  source 1..21: mol_type = other DNA; mol_type = other DNA
tacagtcgtacaaatgaaaat

SEQ ID NO: 32849 - DNA, 21 bp, synthetic construct
  source 1..21: mol_type = other DNA; mol_type = other DNA
tgcaagcctgagagaatgggc

SEQ ID NO: 32850 - DNA, 21 bp, synthetic construct
  source 1..21: mol_type = other DNA; mol_type = other DNA
ggagatactgtagtgagatgg

SEQ ID NO: 32851 - DNA, 21 bp, synthetic construct
  source 1..21: mol_type = other DNA; mol_type = other DNA
tgtatgaaaccaatgactgct

SEQ ID NO: 32852 - DNA, 21 bp, synthetic construct
  source 1..21: mol_type = other DNA; mol_type = other DNA
tattactcgggagtaataagc

SEQ ID NO: 32853 - DNA, 21 bp, synthetic construct
  source 1..21: mol_type = other DNA; mol_type = other DNA
cgtggggagttctcgtatcca

SEQ ID NO: 32854 - DNA, 21 bp, synthetic construct
  source 1..21: mol_type = other DNA; mol_type = other DNA
tattccaaatatcatgtgaat

SEQ ID NO: 32855 - DNA, 21 bp, synthetic construct
  source 1..21: mol_type = other DNA; mol_type = other DNA
atagccgctcatgggtgcggg

SEQ ID NO: 32856 - DNA, 21 bp, synthetic construct
  source 1..21: mol_type = other DNA; mol_type = other DNA
tacagtagagctaacggtaat

SEQ ID NO: 32857 - DNA, 21 bp, synthetic construct
  source 1..21: mol_type = other DNA; mol_type = other DNA
tatagccgattggactcgtac

SEQ ID NO: 32858 - DNA, 21 bp, synthetic construct
  source 1..21: mol_type = other DNA; mol_type = other DNA
ttccccggatcgtgtaaggag

SEQ ID NO: 32859 - DNA, 21 bp, synthetic construct
  source 1..21: mol_type = other DNA; mol_type = other DNA
ttcttttcgggcagattagat

SEQ ID NO: 32860 - DNA, 21 bp, synthetic construct
  source 1..21: mol_type = other DNA; mol_type = other DNA
gtgggcggggcgtgcccgtat

SEQ ID NO: 32861 - DNA, 21 bp, synthetic construct
  source 1..21: mol_type = other DNA; mol_type = other DNA
tactcgcgcaatggagtcaat

SEQ ID NO: 32862 - DNA, 21 bp, synthetic construct
  source 1..21: mol_type = other DNA; mol_type = other DNA
tttgcgtcgactaatggcgtt

SEQ ID NO: 32863 - DNA, 21 bp, synthetic construct
  source 1..21: mol_type = other DNA; mol_type = other DNA
attcccggtcacaagtgtgct

SEQ ID NO: 32864 - DNA, 21 bp, synthetic construct
  source 1..21: mol_type = other DNA; mol_type = other DNA
tactgggccggacgggtcgag

SEQ ID NO: 32865 - DNA, 21 bp, synthetic construct
  source 1..21: mol_type = other DNA; mol_type = other DNA
cagatgggctcgtcgacctgg

SEQ ID NO: 32866 - DNA, 21 bp, synthetic construct
  source 1..21: mol_type = other DNA; mol_type = other DNA
ttcttcaccggcatgcgggag

SEQ ID NO: 32867 - DNA, 21 bp, synthetic construct
  source 1..21: mol_type = other DNA; mol_type = other DNA
tacgacaaacgagaaaattgc

SEQ ID NO: 32868 - DNA, 21 bp, synthetic construct
  source 1..21: mol_type = other DNA; mol_type = other DNA
tatcttaagagcactaataat

SEQ ID NO: 32869 - DNA, 21 bp, synthetic construct
  source 1..21: mol_type = other DNA; mol_type = other DNA
tacgccagacaaaaccacaat

SEQ ID NO: 32870 - DNA, 21 bp, synthetic construct
  source 1..21: mol_type = other DNA; mol_type = other DNA
tatgcgaagcaggggcacaat

SEQ ID NO: 32871 - DNA, 21 bp, synthetic construct
  source 1..21: mol_type = other DNA; mol_type = other DNA
tatagcaagggaaatgcaaac

SEQ ID NO: 32872 - DNA, 21 bp, synthetic construct
  source 1..21: mol_type = other DNA; mol_type = other DNA
tattttaaggagaagtgcagc

SEQ ID NO: 32873 - DNA, 21 bp, synthetic construct
  source 1..21: mol_type = other DNA; mol_type = other DNA
ttttcgagagcgggaacaaat

SEQ ID NO: 32874 - DNA, 21 bp, synthetic construct
  source 1..21: mol_type = other DNA; mol_type = other DNA
tgccaactcaagtctacggac

SEQ ID NO: 32875 - DNA, 21 bp, synthetic construct
  source 1..21: mol_type = other DNA; mol_type = other DNA
tatgctaagcaaagcagaaat

SEQ ID NO: 32876 - DNA, 21 bp, synthetic construct
  source 1..21: mol_type = other DNA; mol_type = other DNA
tattatacgggaaagacttcg

SEQ ID NO: 32877 - DNA, 21 bp, synthetic construct
  source 1..21: mol_type = other DNA; mol_type = other DNA
tatagccgggttaatcacaat

SEQ ID NO: 32878 - DNA, 21 bp, synthetic construct
  source 1..21: mol_type = other DNA; mol_type = other DNA
gtgccaagtagcgctatatgg

SEQ ID NO: 32879 - DNA, 21 bp, synthetic construct
  source 1..21: mol_type = other DNA; mol_type = other DNA
tactcgaaacaagggcagaac

SEQ ID NO: 32880 - DNA, 21 bp, synthetic construct
  source 1..21: mol_type = other DNA; mol_type = other DNA
tacagtcggactaacgcaaat

SEQ ID NO: 32881 - DNA, 21 bp, synthetic construct
  source 1..21: mol_type = other DNA; mol_type = other DNA
tatttcgcgggccagattgcg

SEQ ID NO: 32882 - DNA, 21 bp, synthetic construct
  source 1..21: mol_type = other DNA; mol_type = other DNA
cttagtaaggtaggcgacaat

SEQ ID NO: 32883 - DNA, 21 bp, synthetic construct
  source 1..21: mol_type = other DNA; mol_type = other DNA
agggaagaagtttcatcttgg

SEQ ID NO: 32884 - DNA, 21 bp, synthetic construct
  source 1..21: mol_type = other DNA; mol_type = other DNA
ttgcaccgtgcagcaggtaat

SEQ ID NO: 32885 - DNA, 21 bp, synthetic construct
  source 1..21: mol_type = other DNA; mol_type = other DNA
tacgcacgtcaaggggaaaac

SEQ ID NO: 32886 - DNA, 21 bp, synthetic construct
  source 1..21: mol_type = other DNA; mol_type = other DNA
gtcttaggtcaagggaactgg

SEQ ID NO: 32887 - DNA, 21 bp, synthetic construct
  source 1..21: mol_type = other DNA; mol_type = other DNA
cgcagcgagttcacgggtttt

SEQ ID NO: 32888 - DNA, 21 bp, synthetic construct
  source 1..21: mol_type = other DNA; mol_type = other DNA
tacgccaggggcaacgcgaat

SEQ ID NO: 32889 - DNA, 21 bp, synthetic construct
  source 1..21: mol_type = other DNA; mol_type = other DNA
tatagtagattaaatgttggt

SEQ ID NO: 32890 - DNA, 21 bp, synthetic construct
  source 1..21: mol_type = other DNA; mol_type = other DNA
ctccataagctaagtacgcat

SEQ ID NO: 32891 - DNA, 21 bp, synthetic construct
  source 1..21: mol_type = other DNA; mol_type = other DNA
agaagcgaatttgcggtttat

SEQ ID NO: 32892 - DNA, 21 bp, synthetic construct
  source 1..21: mol_type = other DNA; mol_type = other DNA
tattctagactcggattgaac

SEQ ID NO: 32893 - DNA, 21 bp, synthetic construct
  source 1..21: mol_type = other DNA; mol_type = other DNA
agagatggggagagtaaatgg

SEQ ID NO: 32894 - DNA, 21 bp, synthetic construct
  source 1..21: mol_type = other DNA; mol_type = other DNA
taccatcggttaggcgagcct

SEQ ID NO: 32895 - DNA, 21 bp, synthetic construct
  source 1..21: mol_type = other DNA; mol_type = other DNA
atggaagggacaagttgctta

SEQ ID NO: 32896 - DNA, 21 bp, synthetic construct
  source 1..21: mol_type = other DNA
tgtaagcctcccccttttgcg

SEQ ID NO: 32897 - DNA, 21 bp, synthetic construct
  source 1..21: mol_type = other DNA; mol_type = other DNA
atgcaaggtacatcctgcctc

SEQ ID NO: 32898 - DNA, 21 bp, synthetic construct
  source 1..21: mol_type = other DNA; mol_type = other DNA
aaatctgattacgcgacttat

SEQ ID NO: 32899 - DNA, 21 bp, synthetic construct
  source 1..21: mol_type = other DNA; mol_type = other DNA
tactttaccgccatcattgaa

SEQ ID NO: 32900 - DNA, 21 bp, synthetic construct
  source 1..21: mol_type = other DNA; mol_type = other DNA
ttggccaaggcgggctgtaat

SEQ ID NO: 32901 - DNA, 21 bp, synthetic construct
  source 1..21: mol_type = other DNA; mol_type = other DNA
cttatgcaggaccgcagctgg

SEQ ID NO: 32902 - DNA, 21 bp, synthetic construct
  source 1..21: mol_type = other DNA; mol_type = other DNA
tactacgcgggaaaatgtgcc

SEQ ID NO: 32903 - DNA, 21 bp, synthetic construct
  source 1..21: mol_type = other DNA; mol_type = other DNA
gagccagaaagccgcgactgg

SEQ ID NO: 32904 - DNA, 21 bp, synthetic construct
  source 1..21: mol_type = other DNA; mol_type = other DNA
tggtttacaggacgagttgat

SEQ ID NO: 32905 - DNA, 21 bp, synthetic construct
  source 1..21: mol_type = other DNA; mol_type = other DNA
tactcgaaggggaacacgaac

SEQ ID NO: 32906 - DNA, 21 bp, synthetic construct
  source 1..21: mol_type = other DNA; mol_type = other DNA
tgtcgtccttatttacatgag

SEQ ID NO: 32907 - DNA, 21 bp, synthetic construct
  source 1..21: mol_type = other DNA; mol_type = other DNA
tatagtcgcaaaggggacaat

SEQ ID NO: 32908 - DNA, 21 bp, synthetic construct
  source 1..21: mol_type = other DNA; mol_type = other DNA
tgcctcagggctagacccgag

SEQ ID NO: 32909 - DNA, 21 bp, synthetic construct
  source 1..21: mol_type = other DNA; mol_type = other DNA
ggtcagggtacctcaaagtgg

SEQ ID NO: 32910 - DNA, 21 bp, synthetic construct
  source 1..21: mol_type = other DNA; mol_type = other DNA
ctcagtcgttcgagcatgaat

SEQ ID NO: 32911 - DNA, 21 bp, synthetic construct
  source 1..21: mol_type = other DNA; mol_type = other DNA
tgtttgaaacgctgtacgccc

SEQ ID NO: 32912 - DNA, 21 bp, synthetic construct
  source 1..21: mol_type = other DNA; mol_type = other DNA
tacagcaggacaaatttaaac

SEQ ID NO: 32913 - DNA, 21 bp, synthetic construct
  source 1..21: mol_type = other DNA; mol_type = other DNA
cagaaccagacaagtcgctgg

SEQ ID NO: 32914 - DNA, 21 bp, synthetic construct
  source 1..21: mol_type = other DNA; mol_type = other DNA
tacgcgcgaacaaatctcaac

SEQ ID NO: 32915 - DNA, 21 bp, synthetic construct
  source 1..21: mol_type = other DNA; mol_type = other DNA
tatttccctggatgtaaagag

SEQ ID NO: 32916 - DNA, 21 bp, synthetic construct
  source 1..21: mol_type = other DNA; mol_type = other DNA
tgtcaagacggtagcggggcg

SEQ ID NO: 32917 - DNA, 21 bp, synthetic construct
  source 1..21: mol_type = other DNA; mol_type = other DNA
agaaacggaacgagtgcttgg

SEQ ID NO: 32918 - DNA, 21 bp, synthetic construct
  source 1..21: mol_type = other DNA; mol_type = other DNA
tgtaaatacttgaagagtgac

SEQ ID NO: 32919 - DNA, 21 bp, synthetic construct
  source 1..21: mol_type = other DNA; mol_type = other DNA
gatcccggagacaggaagtgg

SEQ ID NO: 32920 - DNA, 21 bp, synthetic construct
  source 1..21: mol_type = other DNA
tattggagtggaacaacagat

SEQ ID NO: 32921 - DNA, 21 bp, synthetic construct
  source 1..21: mol_type = other DNA; mol_type = other DNA
tattggtctgcggtggtagat

SEQ ID NO: 32922 - DNA, 21 bp, synthetic construct
  source 1..21: mol_type = other DNA; mol_type = other DNA
atcgcgagcaagggcgccggg

SEQ ID NO: 32923 - DNA, 21 bp, synthetic construct
  source 1..21: mol_type = other DNA; mol_type = other DNA
acgtatagtacgaacggaatt

SEQ ID NO: 32924 - DNA, 21 bp, synthetic construct
  source 1..21: mol_type = other DNA; mol_type = other DNA
tacgctcggtccaactataac

SEQ ID NO: 32925 - DNA, 21 bp, synthetic construct
  source 1..21: mol_type = other DNA; mol_type = other DNA
tgcacttctaaaacaatacac

SEQ ID NO: 32926 - DNA, 21 bp, synthetic construct
  source 1..21: mol_type = other DNA; mol_type = other DNA
gccggcccagaccgcggttgg

SEQ ID NO: 32927 - DNA, 21 bp, synthetic construct
  source 1..21: mol_type = other DNA; mol_type = other DNA
taccttaaaaatgacccgctg

SEQ ID NO: 32928 - DNA, 21 bp, synthetic construct
  source 1..21: mol_type = other DNA; mol_type = other DNA
tacttcaccggcaatcgtgac

SEQ ID NO: 32929 - DNA, 21 bp, synthetic construct
  source 1..21: mol_type = other DNA; mol_type = other DNA
ttcttcagcggacagatagca

SEQ ID NO: 32930 - DNA, 21 bp, synthetic construct
  source 1..21: mol_type = other DNA; mol_type = other DNA
cttagtaagttgggtaacaat

SEQ ID NO: 32931 - DNA, 21 bp, synthetic construct
  source 1..21: mol_type = other DNA; mol_type = other DNA
tatacgcgtctgaatgatggt

SEQ ID NO: 32932 - DNA, 21 bp, synthetic construct
  source 1..21: mol_type = other DNA; mol_type = other DNA
ttagcaaaaccgtgtctcacc

SEQ ID NO: 32933 - DNA, 21 bp, synthetic construct
  source 1..21: mol_type = other DNA; mol_type = other DNA
tggttttcggggcgcgtggag

SEQ ID NO: 32934 - DNA, 21 bp, synthetic construct
  source 1..21: mol_type = other DNA; mol_type = other DNA
gtcaccgacaccaatggggtt

SEQ ID NO: 32935 - DNA, 21 bp, synthetic construct
  source 1..21: mol_type = other DNA
tgtgtggactggggtttagat

SEQ ID NO: 32936 - DNA, 21 bp, synthetic construct
  source 1..21: mol_type = other DNA
ttttttagcggtaaaataagt

SEQ ID NO: 32937 - DNA, 21 bp, synthetic construct
  source 1..21: mol_type = other DNA
ttatctaggctggcttttgat

SEQ ID NO: 32938 - DNA, 21 bp, synthetic construct
  source 1..21: mol_type = other DNA
aagggagatataaaatgcgcg

SEQ ID NO: 32939 - DNA, 21 bp, synthetic construct
  source 1..21: mol_type = other DNA
tactggagtggacaaatagac

SEQ ID NO: 32940 - DNA, 21 bp, synthetic construct
  source 1..21: mol_type = other DNA
tatatatctacaaatggacgg

SEQ ID NO: 32941 - DNA, 21 bp, synthetic construct
  source 1..21: mol_type = other DNA
ttcaactctaccaacggaata

SEQ ID NO: 32942 - DNA, 21 bp, synthetic construct
  source 1..21: mol_type = other DNA
tgtcttgccggaaaagatgcg

SEQ ID NO: 32943 - DNA, 21 bp, synthetic construct
  source 1..21: mol_type = other DNA
ttctttaccggggagagggcg

SEQ ID NO: 32944 - DNA, 21 bp, synthetic construct
  source 1..21: mol_type = other DNA
tacagcaggataaatcagaac

SEQ ID NO: 32945 - DNA, 21 bp, synthetic construct
  source 1..21: mol_type = other DNA
tattatcatggggtgagagac

SEQ ID NO: 32946 - DNA, 21 bp, synthetic construct
  source 1..21: mol_type = other DNA
cgaaatgaatttactgtatat

SEQ ID NO: 32947 - DNA, 21 bp, synthetic construct
  source 1..21: mol_type = other DNA
taccatggcaaagagtcatgt

SEQ ID NO: 32948 - DNA, 21 bp, synthetic construct
  source 1..21: mol_type = other DNA
tatgatagtactaacggggta

SEQ ID NO: 32949 - DNA, 21 bp, synthetic construct
  source 1..21: mol_type = other DNA
tattgggaaggagttaaggag

SEQ ID NO: 32950 - DNA, 21 bp, synthetic construct
  source 1..21: mol_type = other DNA
tgtggtaaaaaacagttagac

SEQ ID NO: 32951 - DNA, 21 bp, synthetic construct
  source 1..21: mol_type = other DNA
tgtggcgcgattaagccccct

SEQ ID NO: 32952 - DNA, 21 bp, synthetic construct
  source 1..21: mol_type = other DNA
tgtcctaaaaaccagagggaa

SEQ ID NO: 32953 - DNA, 21 bp, synthetic construct
  source 1..21: mol_type = other DNA
ttcttctcagggcgcatcgat

SEQ ID NO: 32954 - DNA, 21 bp, synthetic construct
  source 1..21: mol_type = other DNA
aaaactgaattcacaacatac

SEQ ID NO: 32955 - DNA, 21 bp, synthetic construct
  source 1..21: mol_type = other DNA
tttagcagaacagggatgaac

SEQ ID NO: 32956 - DNA, 21 bp, synthetic construct
  source 1..21: mol_type = other DNA
tattgggaaggggtcaaagac

SEQ ID NO: 32957 - DNA, 21 bp, synthetic construct
  source 1..21: mol_type = other DNA
gctctcggagatcggacgtgg

SEQ ID NO: 32958 - DNA, 21 bp, synthetic construct
  source 1..21: mol_type = other DNA; mol_type = other DNA
ggttcagaatttaaaagttgg

SEQ ID NO: 32959 - DNA, 21 bp, synthetic construct
  source 1..21: mol_type = other DNA; mol_type = other DNA
tattttagcaacgtgcgtgaa

SEQ ID NO: 32960 - DNA, 21 bp, synthetic construct
  source 1..21: mol_type = other DNA; mol_type = other DNA
tacgttaagagtcaagtaatt

SEQ ID NO: 32961 - DNA, 21 bp, synthetic construct
  source 1..21: mol_type = other DNA; mol_type = other DNA
ttctggagcggaatgaaagat

SEQ ID NO: 32962 - DNA, 21 bp, synthetic construct
  source 1..21: mol_type = other DNA; mol_type = other DNA
tttgagccgggttgtaaggag

SEQ ID NO: 32963 - DNA, 21 bp, synthetic construct
  source 1..21: mol_type = other DNA; mol_type = other DNA
tacagccgggccaaccagaac

SEQ ID NO: 32964 - DNA, 21 bp, synthetic construct
  source 1..21: mol_type = other DNA; mol_type = other DNA
tatgttagatcagatctggct

SEQ ID NO: 32965 - DNA, 21 bp, synthetic construct
  source 1..21: mol_type = other DNA; mol_type = other DNA
tatagtcggcaaaattataat

SEQ ID NO: 32966 - DNA, 21 bp, synthetic construct
  source 1..21: mol_type = other DNA; mol_type = other DNA
tgtggagagtcagttaaacct

SEQ ID NO: 32967 - DNA, 21 bp, synthetic construct
  source 1..21: mol_type = other DNA; mol_type = other DNA
accaatggaactaaatgtgag

SEQ ID NO: 32968 - DNA, 21 bp, synthetic construct
  source 1..21: mol_type = other DNA; mol_type = other DNA
tacgcgcgtatggggatgaat

SEQ ID NO: 32969 - DNA, 21 bp, synthetic construct
  source 1..21: mol_type = other DNA; mol_type = other DNA
aaagacggattctcaggctgg

SEQ ID NO: 32970 - DNA, 21 bp, synthetic construct
  source 1..21: mol_type = other DNA; mol_type = other DNA
tacgagcctatatgcaaagag

SEQ ID NO: 32971 - DNA, 21 bp, synthetic construct
  source 1..21: mol_type = other DNA; mol_type = other DNA
tatgcgaagcacgggtggaat

SEQ ID NO: 32972 - DNA, 21 bp, synthetic construct
  source 1..21: mol_type = other DNA; mol_type = other DNA
tactacaccgggaggactgac

SEQ ID NO: 32973 - DNA, 21 bp, synthetic construct
  source 1..21: mol_type = other DNA; mol_type = other DNA
agctatagcacgaatggtgtc

SEQ ID NO: 32974 - DNA, 21 bp, synthetic construct
  source 1..21: mol_type = other DNA; mol_type = other DNA
agggattatgacagttatcca

SEQ ID NO: 32975 - DNA, 21 bp, synthetic construct
  source 1..21: mol_type = other DNA; mol_type = other DNA
tattctaggaacggcgcgaac

SEQ ID NO: 32976 - DNA, 21 bp, synthetic construct
  source 1..21: mol_type = other DNA; mol_type = other DNA
gacttaagggatcgggcctgg

SEQ ID NO: 32977 - DNA, 21 bp, synthetic construct
  source 1..21: mol_type = other DNA; mol_type = other DNA
tgtttgcgcgcgcgtccggaa

SEQ ID NO: 32978 - DNA, 21 bp, synthetic construct
  source 1..21: mol_type = other DNA; mol_type = other DNA
tatgctcgtatggggctaaac

SEQ ID NO: 32979 - DNA, 21 bp, synthetic construct
  source 1..21: mol_type = other DNA; mol_type = other DNA
tactcacgcggaaaccacaat

SEQ ID NO: 32980 - DNA, 21 bp, synthetic construct
  source 1..21: mol_type = other DNA; mol_type = other DNA
ctcagccgcatgaatgaaaat

SEQ ID NO: 32981 - DNA, 21 bp, synthetic construct
  source 1..21: mol_type = other DNA; mol_type = other DNA
tataacagtactaacggcgta

SEQ ID NO: 32982 - DNA, 21 bp, synthetic construct
  source 1..21: mol_type = other DNA; mol_type = other DNA
tattcgcgccttgatccagtg

SEQ ID NO: 32983 - DNA, 21 bp, synthetic construct
  source 1..21: mol_type = other DNA; mol_type = other DNA
attagttcaagtaacggcgta

SEQ ID NO: 32984 - DNA, 21 bp, synthetic construct
  source 1..21: mol_type = other DNA; mol_type = other DNA
tgggtaaagggggctgaatgc

SEQ ID NO: 32985 - DNA, 21 bp, synthetic construct
  source 1..21: mol_type = other DNA; mol_type = other DNA
aggtcgcctgacgcttatccc

SEQ ID NO: 32986 - DNA, 21 bp, synthetic construct
  source 1..21: mol_type = other DNA; mol_type = other DNA
tgtaaacccttcgtggttgag

SEQ ID NO: 32987 - DNA, 21 bp, synthetic construct
  source 1..21: mol_type = other DNA; mol_type = other DNA
tgtaactaccctatgactgcc

SEQ ID NO: 32988 - DNA, 21 bp, synthetic construct
  source 1..21: mol_type = other DNA; mol_type = other DNA
tatagtaggatgaacgttaac

SEQ ID NO: 32989 - DNA, 21 bp, synthetic construct
  source 1..21: mol_type = other DNA; mol_type = other DNA
tggaccgacggaacacgttat

SEQ ID NO: 32990 - DNA, 21 bp, synthetic construct
  source 1..21: mol_type = other DNA; mol_type = other DNA
tattacaccggtcggacgaac

SEQ ID NO: 32991 - DNA, 21 bp, synthetic construct
  source 1..21: mol_type = other DNA; mol_type = other DNA
gggtgtgggaccaaggagggt

SEQ ID NO: 32992 - DNA, 21 bp, synthetic construct
  source 1..21: mol_type = other DNA; mol_type = other DNA
acaccagacaccgttcgatgg

SEQ ID NO: 32993 - DNA, 21 bp, synthetic construct
  source 1..21: mol_type = other DNA; mol_type = other DNA
tatttcagtggccagcagaga

SEQ ID NO: 32994 - DNA, 21 bp, synthetic construct
  source 1..21: mol_type = other DNA; mol_type = other DNA
tatttttctggttacccagat

SEQ ID NO: 32995 - DNA, 21 bp, synthetic construct
  source 1..21: mol_type = other DNA; mol_type = other DNA
actttctcaacgaatggcatc

SEQ ID NO: 32996 - DNA, 21 bp, synthetic construct
  source 1..21: mol_type = other DNA; mol_type = other DNA
tgtgtcccagattaccgcgaa

SEQ ID NO: 32997 - DNA, 21 bp, synthetic construct
  source 1..21: mol_type = other DNA; mol_type = other DNA
tacttccatgggcgtcatgat

SEQ ID NO: 32998 - DNA, 21 bp, synthetic construct
  source 1..21: mol_type = other DNA; mol_type = other DNA
tactactcgggggtgactgct

SEQ ID NO: 32999 - DNA, 21 bp, synthetic construct
  source 1..21: mol_type = other DNA; mol_type = other DNA
actcaatcatcgaacggtgtt

SEQ ID NO: 33000 - DNA, 21 bp, synthetic construct
  source 1..21: mol_type = other DNA; mol_type = other DNA
tatgatagcactaacggcatt

SEQ ID NO: 33001 - DNA, 21 bp, synthetic construct
  source 1..21: mol_type = other DNA; mol_type = other DNA
cctacatctacaaatggagtt

SEQ ID NO: 33002 - DNA, 21 bp, synthetic construct
  source 1..21: mol_type = other DNA; mol_type = other DNA
cgcgcattagacggattcgac

SEQ ID NO: 33003 - DNA, 21 bp, synthetic construct
  source 1..21: mol_type = other DNA; mol_type = other DNA
tgtaaaccaggccaattgcct

SEQ ID NO: 33004 - DNA, 21 bp, synthetic construct
  source 1..21: mol_type = other DNA; mol_type = other DNA
ctaagtcgcatgaatatgaac

SEQ ID NO: 33005 - DNA, 21 bp, synthetic construct
  source 1..21: mol_type = other DNA; mol_type = other DNA
aatatggcttcggccggatgg

SEQ ID NO: 33006 - DNA, 21 bp, synthetic construct
  source 1..21: mol_type = other DNA; mol_type = other DNA
tattcccgtagcaacacaaat

SEQ ID NO: 33007 - DNA, 21 bp, synthetic construct
  source 1..21: mol_type = other DNA; mol_type = other DNA
tgtttaaaacagttgcctccg

SEQ ID NO: 33008 - DNA, 21 bp, synthetic construct
  source 1..21: mol_type = other DNA; mol_type = other DNA
tgtaagcccggtgccacctcg

SEQ ID NO: 33009 - DNA, 21 bp, synthetic construct
  source 1..21: mol_type = other DNA; mol_type = other DNA
ggtgtgggcacaaagtgtggg

SEQ ID NO: 33010 - DNA, 21 bp, synthetic construct
  source 1..21: mol_type = other DNA; mol_type = other DNA
tatgtccgccatgacgtcaga

SEQ ID NO: 33011 - DNA, 21 bp, synthetic construct
  source 1..21: mol_type = other DNA; mol_type = other DNA
atgttcgacggaactagagcg

SEQ ID NO: 33012 - DNA, 21 bp, synthetic construct
  source 1..21: mol_type = other DNA; mol_type = other DNA
ttcgctaaaacgggctataat

SEQ ID NO: 33013 - DNA, 21 bp, synthetic construct
  source 1..21: mol_type = other DNA; mol_type = other DNA
tgcagtaggttgcctacacct

SEQ ID NO: 33014 - DNA, 21 bp, synthetic construct
  source 1..21: mol_type = other DNA; mol_type = other DNA
agaacttatgatacctttgct

SEQ ID NO: 33015 - DNA, 21 bp, synthetic construct
  source 1..21: mol_type = other DNA; mol_type = other DNA
tactcacgcctccaatttaat

SEQ ID NO: 33016 - DNA, 21 bp, synthetic construct
  source 1..21: mol_type = other DNA; mol_type = other DNA
tttcatcgatctacaccaaat

SEQ ID NO: 33017 - DNA, 21 bp, synthetic construct
  source 1..21: mol_type = other DNA; mol_type = other DNA
tactctaggcaaggattcaat

SEQ ID NO: 33018 - DNA, 21 bp, synthetic construct
  source 1..21: mol_type = other DNA; mol_type = other DNA
tacttctcaggggttaacaga

SEQ ID NO: 33019 - DNA, 21 bp, synthetic construct
  source 1..21: mol_type = other DNA; mol_type = other DNA
attgcgcataagtgccctggt

SEQ ID NO: 33020 - DNA, 21 bp, synthetic construct
  source 1..21: mol_type = other DNA; mol_type = other DNA
tattttgcgggagttattgag

SEQ ID NO: 33021 - DNA, 21 bp, synthetic construct
  source 1..21: mol_type = other DNA; mol_type = other DNA
tattcgaaatggaacgacaat

SEQ ID NO: 33022 - DNA, 21 bp, synthetic construct
  source 1..21: mol_type = other DNA; mol_type = other DNA
tgtaaacctggggctgggact

SEQ ID NO: 33023 - DNA, 21 bp, synthetic construct
  source 1..21: mol_type = other DNA; mol_type = other DNA
tactccaagaataactgtaac

SEQ ID NO: 33024 - DNA, 21 bp, synthetic construct
  source 1..21: mol_type = other DNA; mol_type = other DNA
tgtaagagtttgaaaagcccc

SEQ ID NO: 33025 - DNA, 21 bp, synthetic construct
  source 1..21: mol_type = other DNA; mol_type = other DNA
tttttcactgggaagatggac

SEQ ID NO: 33026 - DNA, 21 bp, synthetic construct
  source 1..21: mol_type = other DNA; mol_type = other DNA
cagtgtaaaccttgtctaaca

SEQ ID NO: 33027 - DNA, 21 bp, synthetic construct
  source 1..21: mol_type = other DNA; mol_type = other DNA
tattttagcggcagaccaagc

SEQ ID NO: 33028 - DNA, 21 bp, synthetic construct
  source 1..21: mol_type = other DNA; mol_type = other DNA
agacacgaggacgtttacccg

SEQ ID NO: 33029 - DNA, 21 bp, synthetic construct
  source 1..21: mol_type = other DNA; mol_type = other DNA
tactctagagggaatgcaaat

SEQ ID NO: 33030 - DNA, 21 bp, synthetic construct
  source 1..21: mol_type = other DNA; mol_type = other DNA
aaagacgatttcagcatgtat

SEQ ID NO: 33031 - DNA, 21 bp, synthetic construct
  source 1..21: mol_type = other DNA; mol_type = other DNA
ttatgtcggccagaaagcgaa

SEQ ID NO: 33032 - DNA, 21 bp, synthetic construct
  source 1..21: mol_type = other DNA; mol_type = other DNA
gtaccggagttctgcaggcct

SEQ ID NO: 33033 - DNA, 21 bp, synthetic construct
  source 1..21: mol_type = other DNA; mol_type = other DNA
tttagtcgacagaattataac

SEQ ID NO: 33034 - DNA, 21 bp, synthetic construct
  source 1..21: mol_type = other DNA; mol_type = other DNA
tgtaagaacaataattcagag

SEQ ID NO: 33035 - DNA, 21 bp, synthetic construct
  source 1..21: mol_type = other DNA; mol_type = other DNA
tgcaaaccaagtcctctggag

SEQ ID NO: 33036 - DNA, 21 bp, synthetic construct
  source 1..21: mol_type = other DNA; mol_type = other DNA
tatgcgcgaatgggtcacaac

SEQ ID NO: 33037 - DNA, 21 bp, synthetic construct
  source 1..21: mol_type = other DNA; mol_type = other DNA
tggtggactggcatggtcgcg

SEQ ID NO: 33038 - DNA, 21 bp, synthetic construct
  source 1..21: mol_type = other DNA; mol_type = other DNA
tgtgacgggagcccaaaagcc

SEQ ID NO: 33039 - DNA, 21 bp, synthetic construct
  source 1..21: mol_type = other DNA; mol_type = other DNA
tacgtacgtagcggggactgt

SEQ ID NO: 33040 - DNA, 21 bp, synthetic construct
  source 1..21: mol_type = other DNA; mol_type = other DNA
tatagtcgtttacttcccatg

SEQ ID NO: 33041 - DNA, 21 bp, synthetic construct
  source 1..21: mol_type = other DNA; mol_type = other DNA
gtcactgcctcgggctgtgcc

SEQ ID NO: 33042 - DNA, 21 bp, synthetic construct
  source 1..21: mol_type = other DNA; mol_type = other DNA
gacctcaaaagcgtgaaatgg

SEQ ID NO: 33043 - DNA, 21 bp, synthetic construct
  source 1..21: mol_type = other DNA; mol_type = other DNA
tggaccgagatgtgcaaagcg

SEQ ID NO: 33044 - DNA, 21 bp, synthetic construct
  source 1..21: mol_type = other DNA; mol_type = other DNA
tattatacgggccagactgag

SEQ ID NO: 33045 - DNA, 21 bp, synthetic construct
  source 1..21: mol_type = other DNA; mol_type = other DNA
caaatgggtagcagtacgtgg

SEQ ID NO: 33046 - DNA, 21 bp, synthetic construct
  source 1..21: mol_type = other DNA; mol_type = other DNA
tattttcatggtcgccatgat

SEQ ID NO: 33047 - DNA, 21 bp, synthetic construct
  source 1..21: mol_type = other DNA; mol_type = other DNA
ggtcccgagggagttaggtgg

SEQ ID NO: 33048 - DNA, 21 bp, synthetic construct
  source 1..21: mol_type = other DNA; mol_type = other DNA
tacagccgcatgggacataac

SEQ ID NO: 33049 - DNA, 21 bp, synthetic construct
  source 1..21: mol_type = other DNA; mol_type = other DNA
atgttgaccgggaaatgtgag

SEQ ID NO: 33050 - DNA, 21 bp, synthetic construct
  source 1..21: mol_type = other DNA; mol_type = other DNA
tacgcgaagacaaactataat

SEQ ID NO: 33051 - DNA, 21 bp, synthetic construct
  source 1..21: mol_type = other DNA; mol_type = other DNA
tacgcgcgacaaaatccaaac

SEQ ID NO: 33052 - DNA, 21 bp, synthetic construct
  source 1..21: mol_type = other DNA; mol_type = other DNA
tacacccgactccagttcgac

SEQ ID NO: 33053 - DNA, 21 bp, synthetic construct
  source 1..21: mol_type = other DNA; mol_type = other DNA
tgtaagctagacaagatggtc

SEQ ID NO: 33054 - DNA, 21 bp, synthetic construct
  source 1..21: mol_type = other DNA; mol_type = other DNA
tatagtagaaacgggagcaat

SEQ ID NO: 33055 - DNA, 21 bp, synthetic construct
  source 1..21: mol_type = other DNA; mol_type = other DNA
tattctcgagccaattcgaac

SEQ ID NO: 33056 - DNA, 21 bp, synthetic construct
  source 1..21: mol_type = other DNA; mol_type = other DNA
aaggtagaccatgtgcgctgg

SEQ ID NO: 33057 - DNA, 21 bp, synthetic construct
  source 1..21: mol_type = other DNA; mol_type = other DNA
tactttgcgggcaagcaggaa

SEQ ID NO: 33058 - DNA, 21 bp, synthetic construct
  source 1..21: mol_type = other DNA; mol_type = other DNA
tgtaacagacccatgacggcc

SEQ ID NO: 33059 - DNA, 21 bp, synthetic construct
  source 1..21: mol_type = other DNA; mol_type = other DNA
tacagccgttcagggtttaat

SEQ ID NO: 33060 - DNA, 21 bp, synthetic construct
  source 1..21: mol_type = other DNA; mol_type = other DNA
tactcacgtcagaatgtcaat

SEQ ID NO: 33061 - DNA, 21 bp, synthetic construct
  source 1..21: mol_type = other DNA; mol_type = other DNA
ctacagagtactaacggtatt

SEQ ID NO: 33062 - DNA, 21 bp, synthetic construct
  source 1..21: mol_type = other DNA; mol_type = other DNA
ggccccggaaccaaatgcggg

SEQ ID NO: 33063 - DNA, 21 bp, synthetic construct
  source 1..21: mol_type = other DNA; mol_type = other DNA
ctcttagcaagtcagacctgg

SEQ ID NO: 33064 - DNA, 21 bp, synthetic construct
  source 1..21: mol_type = other DNA; mol_type = other DNA
tttagtcgagctggaattaac

SEQ ID NO: 33065 - DNA, 21 bp, synthetic construct
  source 1..21: mol_type = other DNA; mol_type = other DNA
tgcgctcgaatgaacagtaat

SEQ ID NO: 33066 - DNA, 21 bp, synthetic construct
  source 1..21: mol_type = other DNA; mol_type = other DNA
ggactggcgtcgagtacatgg

SEQ ID NO: 33067 - DNA, 21 bp, synthetic construct
  source 1..21: mol_type = other DNA; mol_type = other DNA
gagatggaatccagtgtttgg

SEQ ID NO: 33068 - DNA, 21 bp, synthetic construct
  source 1..21: mol_type = other DNA; mol_type = other DNA
tgcaagccaccaaaaggggac

SEQ ID NO: 33069 - DNA, 21 bp, synthetic construct
  source 1..21: mol_type = other DNA; mol_type = other DNA
tactcgaaacagaacagtaat

SEQ ID NO: 33070 - DNA, 21 bp, synthetic construct
  source 1..21: mol_type = other DNA; mol_type = other DNA
tatgcacgtgcaggctttaac

SEQ ID NO: 33071 - DNA, 21 bp, synthetic construct
  source 1..21: mol_type = other DNA; mol_type = other DNA
aggagtgacacggtgtatttt

SEQ ID NO: 33072 - DNA, 21 bp, synthetic construct
  source 1..21: mol_type = other DNA; mol_type = other DNA
tattgggaaggagtccgagaa

SEQ ID NO: 33073 - DNA, 21 bp, synthetic construct
  source 1..21: mol_type = other DNA; mol_type = other DNA
ataccatacgagggaattggt

SEQ ID NO: 33074 - DNA, 21 bp, synthetic construct
  source 1..21: mol_type = other DNA; mol_type = other DNA
tataattccaccaatggcgtt

SEQ ID NO: 33075 - DNA, 21 bp, synthetic construct
  source 1..21: mol_type = other DNA; mol_type = other DNA
ctccacaagcttaatccatgt

SEQ ID NO: 33076 - DNA, 21 bp, synthetic construct
  source 1..21: mol_type = other DNA; mol_type = other DNA
tacagccgggctggccataat

SEQ ID NO: 33077 - DNA, 21 bp, synthetic construct
  source 1..21: mol_type = other DNA; mol_type = other DNA
tacagccgccaggggaataac

SEQ ID NO: 33078 - DNA, 21 bp, synthetic construct
  source 1..21: mol_type = other DNA; mol_type = other DNA
tgtgcgccatacctagcagaa

SEQ ID NO: 33079 - DNA, 21 bp, synthetic construct
  source 1..21: mol_type = other DNA; mol_type = other DNA
tatgctcgtgcaggccacaat

SEQ ID NO: 33080 - DNA, 21 bp, synthetic construct
  source 1..21: mol_type = other DNA; mol_type = other DNA
tacgcgaaacacggctacaac

SEQ ID NO: 33081 - DNA, 21 bp, synthetic construct
  source 1..21: mol_type = other DNA; mol_type = other DNA
tgttccccaatgcgtactccg

SEQ ID NO: 33082 - DNA, 21 bp, synthetic construct
  source 1..21: mol_type = other DNA; mol_type = other DNA
tacttttcaggacagatatgt

SEQ ID NO: 33083 - DNA, 21 bp, synthetic construct
  source 1..21: mol_type = other DNA; mol_type = other DNA
tacgccaaagggggcctcaac

SEQ ID NO: 33084 - DNA, 21 bp, synthetic construct
  source 1..21: mol_type = other DNA; mol_type = other DNA
tgtaagccgcagatgcccact

SEQ ID NO: 33085 - DNA, 21 bp, synthetic construct
  source 1..21: mol_type = other DNA; mol_type = other DNA
tacagccgcggcaattataac

SEQ ID NO: 33086 - DNA, 21 bp, synthetic construct
  source 1..21: mol_type = other DNA; mol_type = other DNA
ggcagcaatggcgtacgatgg

SEQ ID NO: 33087 - DNA, 21 bp, synthetic construct
  source 1..21: mol_type = other DNA; mol_type = other DNA
tatagccgtgggaacgataac

SEQ ID NO: 33088 - DNA, 21 bp, synthetic construct
  source 1..21: mol_type = other DNA; mol_type = other DNA
ttcttcacaggaacacacgaa

SEQ ID NO: 33089 - DNA, 21 bp, synthetic construct
  source 1..21: mol_type = other DNA; mol_type = other DNA
acatgggacggtgacaatgca

SEQ ID NO: 33090 - DNA, 21 bp, synthetic construct
  source 1..21: mol_type = other DNA; mol_type = other DNA
cgaagcgagtatcacacctac

SEQ ID NO: 33091 - DNA, 21 bp, synthetic construct
  source 1..21: mol_type = other DNA; mol_type = other DNA
tattctcgcaatggctacaat

SEQ ID NO: 33092 - DNA, 21 bp, synthetic construct
  source 1..21: mol_type = other DNA; mol_type = other DNA
tattcacgccaaaacgcaaac

SEQ ID NO: 33093 - DNA, 21 bp, synthetic construct
  source 1..21: mol_type = other DNA; mol_type = other DNA
atgtgcgagaaagccaaggac

SEQ ID NO: 33094 - DNA, 21 bp, synthetic construct
  source 1..21: mol_type = other DNA; mol_type = other DNA
ctcgcacggagtggttgggat

SEQ ID NO: 33095 - DNA, 21 bp, synthetic construct
  source 1..21: mol_type = other DNA; mol_type = other DNA
tgcgggaagggaggaccggtt

SEQ ID NO: 33096 - DNA, 21 bp, synthetic construct
  source 1..21: mol_type = other DNA; mol_type = other DNA
ggtatagcaccctgcggtagc

SEQ ID NO: 33097 - DNA, 21 bp, synthetic construct
  source 1..21: mol_type = other DNA; mol_type = other DNA
tactttcagggtgtcgtagct

SEQ ID NO: 33098 - DNA, 21 bp, synthetic construct
  source 1..21: mol_type = other DNA; mol_type = other DNA
aagggcgatcatgtacgctgg

SEQ ID NO: 33099 - DNA, 21 bp, synthetic construct
  source 1..21: mol_type = other DNA; mol_type = other DNA
tgtggcgagggaagcaaagcc

SEQ ID NO: 33100 - DNA, 21 bp, synthetic construct
  source 1..21: mol_type = other DNA; mol_type = other DNA
tatcatagagctgggcttgac

SEQ ID NO: 33101 - DNA, 21 bp, synthetic construct
  source 1..21: mol_type = other DNA; mol_type = other DNA
tatagccgcatgaataacaat

SEQ ID NO: 33102 - DNA, 21 bp, synthetic construct
  source 1..21: mol_type = other DNA; mol_type = other DNA
ctcagcaagttgggcgctaat

SEQ ID NO: 33103 - DNA, 21 bp, synthetic construct
  source 1..21: mol_type = other DNA; mol_type = other DNA
agagaaccgacatgtccatac

SEQ ID NO: 33104 - DNA, 21 bp, synthetic construct
  source 1..21: mol_type = other DNA; mol_type = other DNA
tacgccaggggctcccttaac

SEQ ID NO: 33105 - DNA, 21 bp, synthetic construct
  source 1..21: mol_type = other DNA; mol_type = other DNA
tttttcagcggagagagagaa

SEQ ID NO: 33106 - DNA, 21 bp, synthetic construct
  source 1..21: mol_type = other DNA; mol_type = other DNA
tacttcacgggcgtgcaaccc

SEQ ID NO: 33107 - DNA, 21 bp, synthetic construct
  source 1..21: mol_type = other DNA; mol_type = other DNA
tatgccagagcgaattacaat

SEQ ID NO: 33108 - DNA, 21 bp, synthetic construct
  source 1..21: mol_type = other DNA; mol_type = other DNA
tgcaacaagaagatgggtgac

SEQ ID NO: 33109 - DNA, 21 bp, synthetic construct
  source 1..21: mol_type = other DNA; mol_type = other DNA
taccacaagctagataacatg

SEQ ID NO: 33110 - DNA, 21 bp, synthetic construct
  source 1..21: mol_type = other DNA; mol_type = other DNA
gtaatggaagaccggtcgtgg

SEQ ID NO: 33111 - DNA, 21 bp, synthetic construct
  source 1..21: mol_type = other DNA; mol_type = other DNA
ttcgccaagactggatggaat

SEQ ID NO: 33112 - DNA, 21 bp, synthetic construct
  source 1..21: mol_type = other DNA; mol_type = other DNA
ggtagtgagtattccagctat

SEQ ID NO: 33113 - DNA, 21 bp, synthetic construct
  source 1..21: mol_type = other DNA; mol_type = other DNA
tgcgcaccaacattgcacgaa

SEQ ID NO: 33114 - DNA, 21 bp, synthetic construct
  source 1..21: mol_type = other DNA; mol_type = other DNA
tttagcaaacataactataat

SEQ ID NO: 33115 - DNA, 21 bp, synthetic construct
  source 1..21: mol_type = other DNA; mol_type = other DNA
attagagactacaagacatgc

SEQ ID NO: 33116 - DNA, 21 bp, synthetic construct
  source 1..21: mol_type = other DNA; mol_type = other DNA
tactggagccaggtccaagct

SEQ ID NO: 33117 - DNA, 21 bp, synthetic construct
  source 1..21: mol_type = other DNA; mol_type = other DNA
ttgtcgaagagcggattcaac

SEQ ID NO: 33118 - DNA, 21 bp, synthetic construct
  source 1..21: mol_type = other DNA; mol_type = other DNA
cagcgtggtgtcggcatgtgt

SEQ ID NO: 33119 - DNA, 21 bp, synthetic construct
  source 1..21: mol_type = other DNA; mol_type = other DNA
tactctaagttcaattacaac

SEQ ID NO: 33120 - DNA, 21 bp, synthetic construct
  source 1..21: mol_type = other DNA; mol_type = other DNA
taccatagggcacaaatgaac

SEQ ID NO: 33121 - DNA, 21 bp, synthetic construct
  source 1..21: mol_type = other DNA; mol_type = other DNA
atggatgggaacagcctctgg

SEQ ID NO: 33122 - DNA, 21 bp, synthetic construct
  source 1..21: mol_type = other DNA; mol_type = other DNA
tacgcccgtcaggggcagaat

SEQ ID NO: 33123 - DNA, 21 bp, synthetic construct
  source 1..21: mol_type = other DNA; mol_type = other DNA
tatttcgcgggaaagacatcc

SEQ ID NO: 33124 - DNA, 21 bp, synthetic construct
  source 1..21: mol_type = other DNA; mol_type = other DNA
gtcaagagtagtaacggggta

SEQ ID NO: 33125 - DNA, 21 bp, synthetic construct
  source 1..21: mol_type = other DNA; mol_type = other DNA
tattcgcggactaattacaac

SEQ ID NO: 33126 - DNA, 21 bp, synthetic construct
  source 1..21: mol_type = other DNA; mol_type = other DNA
tgtaggagtactaatggggtt

SEQ ID NO: 33127 - DNA, 21 bp, synthetic construct
  source 1..21: mol_type = other DNA; mol_type = other DNA
tacttcacacggcaagtgaat

SEQ ID NO: 33128 - DNA, 21 bp, synthetic construct
  source 1..21: mol_type = other DNA; mol_type = other DNA
tatgactcaacaaatggaata

SEQ ID NO: 33129 - DNA, 21 bp, synthetic construct
  source 1..21: mol_type = other DNA; mol_type = other DNA
taccaccgtgcaggattagac

SEQ ID NO: 33130 - DNA, 21 bp, synthetic construct
  source 1..21: mol_type = other DNA; mol_type = other DNA
tctgatggttatagcaagtgg

SEQ ID NO: 33131 - DNA, 21 bp, synthetic construct
  source 1..21: mol_type = other DNA; mol_type = other DNA
ttttggagcgggatggtggcg

SEQ ID NO: 33132 - DNA, 21 bp, synthetic construct
  source 1..21: mol_type = other DNA; mol_type = other DNA
ctttcacggtccgggaccaat

SEQ ID NO: 33133 - DNA, 21 bp, synthetic construct
  source 1..21: mol_type = other DNA; mol_type = other DNA
tattccagagtgaacccaaac

SEQ ID NO: 33134 - DNA, 21 bp, synthetic construct
  source 1..21: mol_type = other DNA; mol_type = other DNA
ggggggggcagttcgtcatgg

SEQ ID NO: 33135 - DNA, 21 bp, synthetic construct
  source 1..21: mol_type = other DNA; mol_type = other DNA
ttctggtcgggaattcccgaa

SEQ ID NO: 33136 - DNA, 21 bp, synthetic construct
  source 1..21: mol_type = other DNA; mol_type = other DNA
ctttgggacggcacagtagct

SEQ ID NO: 33137 - DNA, 21 bp, synthetic construct
  source 1..21: mol_type = other DNA; mol_type = other DNA
gcatcatcgaccaacggcata

SEQ ID NO: 33138 - DNA, 21 bp, synthetic construct
  source 1..21: mol_type = other DNA; mol_type = other DNA
tatagccgcttagataattta

SEQ ID NO: 33139 - DNA, 21 bp, synthetic construct
  source 1..21: mol_type = other DNA; mol_type = other DNA
tactcccggcaaggtgagaac

SEQ ID NO: 33140 - DNA, 21 bp, synthetic construct
  source 1..21: mol_type = other DNA; mol_type = other DNA
tattggtcaggacaattagag

SEQ ID NO: 33141 - DNA, 21 bp, synthetic construct
  source 1..21: mol_type = other DNA; mol_type = other DNA
tgtaagtcagaccgcaaggaa

SEQ ID NO: 33142 - DNA, 21 bp, synthetic construct
  source 1..21: mol_type = other DNA; mol_type = other DNA
acgacggaaggtgtcagatgg

SEQ ID NO: 33143 - DNA, 21 bp, synthetic construct
  source 1..21: mol_type = other DNA; mol_type = other DNA
tcgttatgcaagacaactagt

SEQ ID NO: 33144 - DNA, 21 bp, synthetic construct
  source 1..21: mol_type = other DNA; mol_type = other DNA
tatttttcgggcatgcaagcc

SEQ ID NO: 33145 - DNA, 21 bp, synthetic construct
  source 1..21: mol_type = other DNA; mol_type = other DNA
aattcacccgcctgcaaagcg

SEQ ID NO: 33146 - DNA, 21 bp, synthetic construct
  source 1..21: mol_type = other DNA; mol_type = other DNA
gatttatcgagtactcagtgg

SEQ ID NO: 33147 - DNA, 21 bp, synthetic construct
  source 1..21: mol_type = other DNA; mol_type = other DNA
tgcaaacccgcgatgcatgaa

SEQ ID NO: 33148 - DNA, 21 bp, synthetic construct
  source 1..21: mol_type = other DNA; mol_type = other DNA
tggactgaaatgtgtaaggca

SEQ ID NO: 33149 - DNA, 21 bp, synthetic construct
  source 1..21: mol_type = other DNA; mol_type = other DNA
tgcaggcccccgatgctggaa

SEQ ID NO: 33150 - DNA, 21 bp, synthetic construct
  source 1..21: mol_type = other DNA; mol_type = other DNA
cgcgatggtaattcgatatgg

SEQ ID NO: 33151 - DNA, 21 bp, synthetic construct
  source 1..21: mol_type = other DNA; mol_type = other DNA
tgtatgagcaagacgggacac

SEQ ID NO: 33152 - DNA, 21 bp, synthetic construct
  source 1..21: mol_type = other DNA; mol_type = other DNA
ttttggagcggtaaagtcgat

SEQ ID NO: 33153 - DNA, 21 bp, synthetic construct
  source 1..21: mol_type = other DNA; mol_type = other DNA
tacgcgcgtcttagtccaatg

SEQ ID NO: 33154 - DNA, 21 bp, synthetic construct
  source 1..21: mol_type = other DNA; mol_type = other DNA
aggacttatgatacttacgct

SEQ ID NO: 33155 - DNA, 21 bp, synthetic construct
  source 1..21: mol_type = other DNA; mol_type = other DNA
tattgggaaggaactaggcat

SEQ ID NO: 33156 - DNA, 21 bp, synthetic construct
  source 1..21: mol_type = other DNA; mol_type = other DNA
tatagcaagaatggggccaat

SEQ ID NO: 33157 - DNA, 21 bp, synthetic construct
  source 1..21: mol_type = other DNA; mol_type = other DNA
acggatgggtcatgcaaagcc

SEQ ID NO: 33158 - DNA, 21 bp, synthetic construct
  source 1..21: mol_type = other DNA; mol_type = other DNA
tgtgctccggacgcgagagaa

SEQ ID NO: 33159 - DNA, 21 bp, synthetic construct
  source 1..21: mol_type = other DNA; mol_type = other DNA
tgtaagccaggtgcaggtgag

SEQ ID NO: 33160 - DNA, 21 bp, synthetic construct
  source 1..21: mol_type = other DNA; mol_type = other DNA
acccccgatacagtgaggtgg

SEQ ID NO: 33161 - DNA, 21 bp, synthetic construct
  source 1..21: mol_type = other DNA; mol_type = other DNA
agagatgctgcctcgagctgg

SEQ ID NO: 33162 - DNA, 21 bp, synthetic construct
  source 1..21: mol_type = other DNA; mol_type = other DNA
gccgagagttcccgactctgg

SEQ ID NO: 33163 - DNA, 21 bp, synthetic construct
  source 1..21: mol_type = other DNA; mol_type = other DNA
attccgaacaggtgtgaggcg

SEQ ID NO: 33164 - DNA, 21 bp, synthetic construct
  source 1..21: mol_type = other DNA; mol_type = other DNA
gacatggcaagcatgaaatgg

SEQ ID NO: 33165 - DNA, 21 bp, synthetic construct
  source 1..21: mol_type = other DNA; mol_type = other DNA
tactacaccggaaaatgcgat

SEQ ID NO: 33166 - DNA, 21 bp, synthetic construct
  source 1..21: mol_type = other DNA; mol_type = other DNA
tgtggaccgcggaatcccgag

SEQ ID NO: 33167 - DNA, 21 bp, synthetic construct
  source 1..21: mol_type = other DNA; mol_type = other DNA
agagacaatggatgtaaggaa

SEQ ID NO: 33168 - DNA, 21 bp, synthetic construct
  source 1..21: mol_type = other DNA; mol_type = other DNA
tacagtagaatcaacaacaat

SEQ ID NO: 33169 - DNA, 21 bp, synthetic construct
  source 1..21: mol_type = other DNA; mol_type = other DNA
ggaagtactgtatgtaaagat

SEQ ID NO: 33170 - DNA, 21 bp, synthetic construct
  source 1..21: mol_type = other DNA; mol_type = other DNA
tactggagtgaaatacgcgaa

SEQ ID NO: 33171 - DNA, 21 bp, synthetic construct
  source 1..21: mol_type = other DNA; mol_type = other DNA
tatgctcgccacggcgcgaat

SEQ ID NO: 33172 - DNA, 21 bp, synthetic construct
  source 1..21: mol_type = other DNA; mol_type = other DNA
ttctcgaaaatgaactttaac

SEQ ID NO: 33173 - DNA, 21 bp, synthetic construct
  source 1..21: mol_type = other DNA; mol_type = other DNA
ccgtacgctgcgtcaagagac

SEQ ID NO: 33174 - DNA, 21 bp, synthetic construct
  source 1..21: mol_type = other DNA; mol_type = other DNA
aacgccgctgttggaaattgc

SEQ ID NO: 33175 - DNA, 21 bp, synthetic construct
  source 1..21: mol_type = other DNA; mol_type = other DNA
tggttcacgggcaggatagat

SEQ ID NO: 33176 - DNA, 21 bp, synthetic construct
  source 1..21: mol_type = other DNA; mol_type = other DNA
tattatacaggcgtaacccga

SEQ ID NO: 33177 - DNA, 21 bp, synthetic construct
  source 1..21: mol_type = other DNA; mol_type = other DNA
ttctctcggatgaacctgaat

SEQ ID NO: 33178 - DNA, 21 bp, synthetic construct
  source 1..21: mol_type = other DNA; mol_type = other DNA
ggtggggaatcatctgtatgg

SEQ ID NO: 33179 - DNA, 21 bp, synthetic construct
  source 1..21: mol_type = other DNA; mol_type = other DNA
gggagcccgggcgtacagtgg

SEQ ID NO: 33180 - DNA, 21 bp, synthetic construct
  source 1..21: mol_type = other DNA; mol_type = other DNA
tgggacagcaccaatggcatt

SEQ ID NO: 33181 - DNA, 21 bp, synthetic construct
  source 1..21: mol_type = other DNA; mol_type = other DNA
aacttagaatcacgtgaatgg

SEQ ID NO: 33182 - DNA, 21 bp, synthetic construct
  source 1..21: mol_type = other DNA; mol_type = other DNA
atgacgggaacatcgtgtaat

SEQ ID NO: 33183 - DNA, 21 bp, synthetic construct
  source 1..21: mol_type = other DNA; mol_type = other DNA
atgaagggtagttgtgaacaa

SEQ ID NO: 33184 - DNA, 21 bp, synthetic construct
  source 1..21: mol_type = other DNA
aaggatgattttgtggtattc

SEQ ID NO: 33185 - DNA, 21 bp, synthetic construct
  source 1..21: mol_type = other DNA; mol_type = other DNA
acatgggatgggatgattgct

SEQ ID NO: 33186 - DNA, 21 bp, synthetic construct
  source 1..21: mol_type = other DNA; mol_type = other DNA
tattgggcagggaaatacgat

SEQ ID NO: 33187 - DNA, 21 bp, synthetic construct
  source 1..21: mol_type = other DNA; mol_type = other DNA
gtggaatttgagtggagcgac

SEQ ID NO: 33188 - DNA, 21 bp, synthetic construct
  source 1..21: mol_type = other DNA; mol_type = other DNA
aagacagaattttgcgcagca

SEQ ID NO: 33189 - DNA, 21 bp, synthetic construct
  source 1..21: mol_type = other DNA; mol_type = other DNA
tgccgccccagcggtttggaa

SEQ ID NO: 33190 - DNA, 21 bp, synthetic construct
  source 1..21: mol_type = other DNA; mol_type = other DNA
gactatgcatctagggactgg

SEQ ID NO: 33191 - DNA, 21 bp, synthetic construct
  source 1..21: mol_type = other DNA
tatgcgcgcgggaatgctaac

SEQ ID NO: 33192 - DNA, 21 bp, synthetic construct
  source 1..21: mol_type = other DNA; mol_type = other DNA
tttaactctactaacggacgc

SEQ ID NO: 33193 - DNA, 21 bp, synthetic construct
  source 1..21: mol_type = other DNA; mol_type = other DNA
ggtgctggaacaaagtgcggg

SEQ ID NO: 33194 - DNA, 21 bp, synthetic construct
  source 1..21: mol_type = other DNA; mol_type = other DNA
tgtaagggaccgtacagcgag

SEQ ID NO: 33195 - DNA, 21 bp, synthetic construct
  source 1..21: mol_type = other DNA; mol_type = other DNA
cgggacccaggagttagatgg

SEQ ID NO: 33196 - DNA, 21 bp, synthetic construct
  source 1..21: mol_type = other DNA; mol_type = other DNA
tacaataacaagacgacatgt

SEQ ID NO: 33197 - DNA, 21 bp, synthetic construct
  source 1..21: mol_type = other DNA; mol_type = other DNA
tattacagtgggcagagggat

SEQ ID NO: 33198 - DNA, 21 bp, synthetic construct
  source 1..21: mol_type = other DNA; mol_type = other DNA
tgcaaaccgggctcccccatt

SEQ ID NO: 33199 - DNA, 21 bp, synthetic construct
  source 1..21: mol_type = other DNA; mol_type = other DNA
tgtaagccaggtaacgcagcc

SEQ ID NO: 33200 - DNA, 21 bp, synthetic construct
  source 1..21: mol_type = other DNA; mol_type = other DNA
tatcacaggctggacgccatg

SEQ ID NO: 33201 - DNA, 21 bp, synthetic construct
  source 1..21: mol_type = other DNA; mol_type = other DNA
tacttcagcggaatgccattg

SEQ ID NO: 33202 - DNA, 21 bp, synthetic construct
  source 1..21: mol_type = other DNA; mol_type = other DNA
tgtaagttgccaaaatcggaa

SEQ ID NO: 33203 - DNA, 21 bp, synthetic construct
  source 1..21: mol_type = other DNA; mol_type = other DNA
tatttcagcggcacctaccaa

SEQ ID NO: 33204 - DNA, 21 bp, synthetic construct
  source 1..21: mol_type = other DNA; mol_type = other DNA
ggcgggggcgtctctcgctgg

SEQ ID NO: 33205 - DNA, 21 bp, synthetic construct
  source 1..21: mol_type = other DNA; mol_type = other DNA
acggagccggggtgtaaagaa

SEQ ID NO: 33206 - DNA, 21 bp, synthetic construct
  source 1..21: mol_type = other DNA; mol_type = other DNA
cgtgacgcagacgtgtaccct

SEQ ID NO: 33207 - DNA, 21 bp, synthetic construct
  source 1..21: mol_type = other DNA; mol_type = other DNA
tattggagtggtcagattgca

SEQ ID NO: 33208 - DNA, 21 bp, synthetic construct
  source 1..21: mol_type = other DNA; mol_type = other DNA
ggttcttggataccacatggt

SEQ ID NO: 33209 - DNA, 21 bp, synthetic construct
  source 1..21: mol_type = other DNA; mol_type = other DNA
tataccagaactcaggcctac

SEQ ID NO: 33210 - DNA, 21 bp, synthetic construct
  source 1..21: mol_type = other DNA; mol_type = other DNA
tatagtcgaggcaatctcaat

SEQ ID NO: 33211 - DNA, 21 bp, synthetic construct
  source 1..21: mol_type = other DNA; mol_type = other DNA
agggcgttcgatgcttacgaa

SEQ ID NO: 33212 - DNA, 21 bp, synthetic construct
  source 1..21: mol_type = other DNA; mol_type = other DNA
tttttttccggggtacaagcc

SEQ ID NO: 33213 - DNA, 21 bp, synthetic construct
  source 1..21: mol_type = other DNA; mol_type = other DNA
tacttccatggcatgactgac

SEQ ID NO: 33214 - DNA, 21 bp, synthetic construct
  source 1..21: mol_type = other DNA; mol_type = other DNA
tatagcagaagtaatccaaat

SEQ ID NO: 33215 - DNA, 21 bp, synthetic construct
  source 1..21: mol_type = other DNA; mol_type = other DNA
tactccagagggaaccccaac

SEQ ID NO: 33216 - DNA, 21 bp, synthetic construct
  source 1..21: mol_type = other DNA; mol_type = other DNA
tatagcagaaatggcttcaat

SEQ ID NO: 33217 - DNA, 21 bp, synthetic construct
  source 1..21: mol_type = other DNA; mol_type = other DNA
tttttttcgggacgcctggag

SEQ ID NO: 33218 - DNA, 21 bp, synthetic construct
  source 1..21: mol_type = other DNA; mol_type = other DNA
tacgcacgctcaggatataac

SEQ ID NO: 33219 - DNA, 21 bp, synthetic construct
  source 1..21: mol_type = other DNA; mol_type = other DNA
tactttcaaggaattcacgcg

SEQ ID NO: 33220 - DNA, 21 bp, synthetic construct
  source 1..21: mol_type = other DNA; mol_type = other DNA
agggatgaattcatgagcttc

SEQ ID NO: 33221 - DNA, 21 bp, synthetic construct
  source 1..21: mol_type = other DNA; mol_type = other DNA
catctcgccagccacacgtgg

SEQ ID NO: 33222 - DNA, 21 bp, synthetic construct
  source 1..21: mol_type = other DNA; mol_type = other DNA
ggaggcatgggcagtcaatgg

SEQ ID NO: 33223 - DNA, 21 bp, synthetic construct
  source 1..21: mol_type = other DNA; mol_type = other DNA
tgtatgagcagagccgttgct

SEQ ID NO: 33224 - DNA, 21 bp, synthetic construct
  source 1..21: mol_type = other DNA; mol_type = other DNA
tgtaagccgcaggcgggacct

SEQ ID NO: 33225 - DNA, 21 bp, synthetic construct
  source 1..21: mol_type = other DNA; mol_type = other DNA
ttctttaccggggcgtgcgac

SEQ ID NO: 33226 - DNA, 21 bp, synthetic construct
  source 1..21: mol_type = other DNA; mol_type = other DNA
tgtaaagaaggtagcagttgg

SEQ ID NO: 33227 - DNA, 21 bp, synthetic construct
  source 1..21: mol_type = other DNA; mol_type = other DNA
gggggcagtggcacccaatgc

SEQ ID NO: 33228 - DNA, 21 bp, synthetic construct
  source 1..21: mol_type = other DNA; mol_type = other DNA
tacaccagactcaacgacggg

SEQ ID NO: 33229 - DNA, 21 bp, synthetic construct
  source 1..21: mol_type = other DNA; mol_type = other DNA
agagggccggatacgttcccg

SEQ ID NO: 33230 - DNA, 21 bp, synthetic construct
  source 1..21: mol_type = other DNA; mol_type = other DNA
tattatagcgggagacttgag

SEQ ID NO: 33231 - DNA, 21 bp, synthetic construct
  source 1..21: mol_type = other DNA; mol_type = other DNA
tccgggggtgggctcttcccg

SEQ ID NO: 33232 - DNA, 21 bp, synthetic construct
  source 1..21: mol_type = other DNA; mol_type = other DNA
tgccgcccgcctatgccacca

SEQ ID NO: 33233 - DNA, 21 bp, synthetic construct
  source 1..21: mol_type = other DNA; mol_type = other DNA
atgacgtcgacgaatggcgtg

SEQ ID NO: 33234 - DNA, 21 bp, synthetic construct
  source 1..21: mol_type = other DNA; mol_type = other DNA
tggtcagccgccgtacaatgc

SEQ ID NO: 33235 - DNA, 21 bp, synthetic construct
  source 1..21: mol_type = other DNA; mol_type = other DNA
tacgccagacagaaccccaat

SEQ ID NO: 33236 - DNA, 21 bp, synthetic construct
  source 1..21: mol_type = other DNA; mol_type = other DNA
tgcaataagccgatgattgca

SEQ ID NO: 33237 - DNA, 21 bp, synthetic construct
  source 1..21: mol_type = other DNA; mol_type = other DNA
gtcgatagcactcatggagtc

SEQ ID NO: 33238 - DNA, 21 bp, synthetic construct
  source 1..21: mol_type = other DNA; mol_type = other DNA
ggttccattggcgttgcttgg

SEQ ID NO: 33239 - DNA, 21 bp, synthetic construct
  source 1..21: mol_type = other DNA; mol_type = other DNA
tgcaaaccccaggcggggacg

SEQ ID NO: 33240 - DNA, 21 bp, synthetic construct
  source 1..21: mol_type = other DNA; mol_type = other DNA
aagggtgacagccgggattgg

SEQ ID NO: 33241 - DNA, 21 bp, synthetic construct
  source 1..21: mol_type = other DNA; mol_type = other DNA
gagcttgggtcgcatacgtgg

SEQ ID NO: 33242 - DNA, 21 bp, synthetic construct
  source 1..21: mol_type = other DNA; mol_type = other DNA
tatttcagtggcagggcccaa

SEQ ID NO: 33243 - DNA, 21 bp, synthetic construct
  source 1..21: mol_type = other DNA; mol_type = other DNA
tattcacgacaaggcacaaac

SEQ ID NO: 33244 - DNA, 21 bp, synthetic construct
  source 1..21: mol_type = other DNA; mol_type = other DNA
tatagtagacagggagaaaat

SEQ ID NO: 33245 - DNA, 21 bp, synthetic construct
  source 1..21: mol_type = other DNA; mol_type = other DNA
gtaccggaacgctgtcctctc

SEQ ID NO: 33246 - DNA, 21 bp, synthetic construct
  source 1..21: mol_type = other DNA; mol_type = other DNA
taccacgctaaatcaacaaac

SEQ ID NO: 33247 - DNA, 21 bp, synthetic construct
  source 1..21: mol_type = other DNA; mol_type = other DNA
cgaatggaagaccatggatgg

SEQ ID NO: 33248 - DNA, 21 bp, synthetic construct
  source 1..21: mol_type = other DNA; mol_type = other DNA
tgcaaacctaatagcggcgga

SEQ ID NO: 33249 - DNA, 21 bp, synthetic construct
  source 1..21: mol_type = other DNA; mol_type = other DNA
aggttggaaagtgtcaattgg

SEQ ID NO: 33250 - DNA, 21 bp, synthetic construct
  source 1..21: mol_type = other DNA; mol_type = other DNA
ggttgccggcatggcgacagt

SEQ ID NO: 33251 - DNA, 21 bp, synthetic construct
  source 1..21: mol_type = other DNA; mol_type = other DNA
tgggtgagatcagatgtaaag

SEQ ID NO: 33252 - DNA, 21 bp, synthetic construct
  source 1..21: mol_type = other DNA; mol_type = other DNA
tacttttcgggccaagcagag

SEQ ID NO: 33253 - DNA, 21 bp, synthetic construct
  source 1..21: mol_type = other DNA; mol_type = other DNA
tactattcgggggtatcagca

SEQ ID NO: 33254 - DNA, 21 bp, synthetic construct
  source 1..21: mol_type = other DNA; mol_type = other DNA
ttggccagaaatggctggaat

SEQ ID NO: 33255 - DNA, 21 bp, synthetic construct
  source 1..21: mol_type = other DNA; mol_type = other DNA
tattggaccggaatgccagaa

SEQ ID NO: 33256 - DNA, 21 bp, synthetic construct
  source 1..21: mol_type = other DNA; mol_type = other DNA
tcaatgcaagacaggatgtgg

SEQ ID NO: 33257 - DNA, 21 bp, synthetic construct
  source 1..21: mol_type = other DNA; mol_type = other DNA
tacttccagggtatacaggct

SEQ ID NO: 33258 - DNA, 21 bp, synthetic construct
  source 1..21: mol_type = other DNA; mol_type = other DNA
gccagtgacgagtggcgcgat

SEQ ID NO: 33259 - DNA, 21 bp, synthetic construct
  source 1..21: mol_type = other DNA; mol_type = other DNA
tggtggtcggcgatacgtgaa

SEQ ID NO: 33260 - DNA, 21 bp, synthetic construct
  source 1..21: mol_type = other DNA; mol_type = other DNA
atcggtagtactaatggtata

SEQ ID NO: 33261 - DNA, 21 bp, synthetic construct
  source 1..21: mol_type = other DNA; mol_type = other DNA
tacagtaggttgtcggagttt

SEQ ID NO: 33262 - DNA, 21 bp, synthetic construct
  source 1..21: mol_type = other DNA; mol_type = other DNA
tggacacacatgtgcaaagca

SEQ ID NO: 33263 - DNA, 21 bp, synthetic construct
  source 1..21: mol_type = other DNA; mol_type = other DNA
agggccgaggcagtccggtgg

SEQ ID NO: 33264 - DNA, 21 bp, synthetic construct
  source 1..21: mol_type = other DNA; mol_type = other DNA
tattggagtggacaagtagaa

SEQ ID NO: 33265 - DNA, 21 bp, synthetic construct
  source 1..21: mol_type = other DNA; mol_type = other DNA
ttgacgaggccatgctcagag

SEQ ID NO: 33266 - DNA, 21 bp, synthetic construct
  source 1..21: mol_type = other DNA; mol_type = other DNA
tccatgcaggacaggcattgg

SEQ ID NO: 33267 - DNA, 21 bp, synthetic construct
  source 1..21: mol_type = other DNA; mol_type = other DNA
cggaacgaatacaccacttac

SEQ ID NO: 33268 - DNA, 21 bp, synthetic construct
  source 1..21: mol_type = other DNA; mol_type = other DNA
tacgttgcacaatgccaagtc

SEQ ID NO: 33269 - DNA, 21 bp, synthetic construct
  source 1..21: mol_type = other DNA; mol_type = other DNA
tattggagtgctgtaacagcc

SEQ ID NO: 33270 - DNA, 21 bp, synthetic construct
  source 1..21: mol_type = other DNA; mol_type = other DNA
acatggagtggagataacgct

SEQ ID NO: 33271 - DNA, 21 bp, synthetic construct
  source 1..21: mol_type = other DNA; mol_type = other DNA
attgcgcacgagggcgctgga

SEQ ID NO: 33272 - DNA, 21 bp, synthetic construct
  source 1..21: mol_type = other DNA; mol_type = other DNA
tattcacgcgtcaattctaac

SEQ ID NO: 33273 - DNA, 21 bp, synthetic construct
  source 1..21: mol_type = other DNA; mol_type = other DNA
tgcaaaatcgctagtgttcca

SEQ ID NO: 33274 - DNA, 21 bp, synthetic construct
  source 1..21: mol_type = other DNA; mol_type = other DNA
tacttctctggagagagagca

SEQ ID NO: 33275 - DNA, 21 bp, synthetic construct
  source 1..21: mol_type = other DNA; mol_type = other DNA
gatctcggtgacagaaaatgg

SEQ ID NO: 33276 - DNA, 21 bp, synthetic construct
  source 1..21: mol_type = other DNA; mol_type = other DNA
tgtaaattgaacggtcccgac

SEQ ID NO: 33277 - DNA, 21 bp, synthetic construct
  source 1..21: mol_type = other DNA; mol_type = other DNA
ggaatagatgtcgtacgatgg

SEQ ID NO: 33278 - DNA, 21 bp, synthetic construct
  source 1..21: mol_type = other DNA; mol_type = other DNA
tattggtccgagattagggag

SEQ ID NO: 33279 - DNA, 21 bp, synthetic construct
  source 1..21: mol_type = other DNA; mol_type = other DNA
tattcacgtatgaattctaac

SEQ ID NO: 33280 - DNA, 21 bp, synthetic construct
  source 1..21: mol_type = other DNA; mol_type = other DNA
gtcgactcgagggaaggcagg

SEQ ID NO: 33281 - DNA, 21 bp, synthetic construct
  source 1..21: mol_type = other DNA; mol_type = other DNA
aaatttgattttacaggcgtt

SEQ ID NO: 33282 - DNA, 21 bp, synthetic construct
  source 1..21: mol_type = other DNA; mol_type = other DNA
tatgaatacgggtgtaaggaa

SEQ ID NO: 33283 - DNA, 21 bp, synthetic construct
  source 1..21: mol_type = other DNA; mol_type = other DNA
tgtaaaccggaaatgcttcgt

SEQ ID NO: 33284 - DNA, 21 bp, synthetic construct
  source 1..21: mol_type = other DNA; mol_type = other DNA
ctctccaggatgaacatgaat

SEQ ID NO: 33285 - DNA, 21 bp, synthetic construct
  source 1..21: mol_type = other DNA; mol_type = other DNA
ttaagtcgatcaggcacaaat

SEQ ID NO: 33286 - DNA, 21 bp, synthetic construct
  source 1..21: mol_type = other DNA; mol_type = other DNA
agggacgatgggtcctattgg

SEQ ID NO: 33287 - DNA, 21 bp, synthetic construct
  source 1..21: mol_type = other DNA; mol_type = other DNA
aatgcattggaggggaaggac

SEQ ID NO: 33288 - DNA, 21 bp, synthetic construct
  source 1..21: mol_type = other DNA; mol_type = other DNA
tatgagaacggttgtaaggag

SEQ ID NO: 33289 - DNA, 21 bp, synthetic construct
  source 1..21: mol_type = other DNA; mol_type = other DNA
tattactcaggcgtacaagca

SEQ ID NO: 33290 - DNA, 21 bp, synthetic construct
  source 1..21: mol_type = other DNA; mol_type = other DNA
cgtgagtccactaatggtgtg

SEQ ID NO: 33291 - DNA, 21 bp, synthetic construct
  source 1..21: mol_type = other DNA; mol_type = other DNA
ttttttactggcactcatgag

SEQ ID NO: 33292 - DNA, 21 bp, synthetic construct
  source 1..21: mol_type = other DNA; mol_type = other DNA
atcgtgtctaccaatggacgt

SEQ ID NO: 33293 - DNA, 21 bp, synthetic construct
  source 1..21: mol_type = other DNA; mol_type = other DNA
gatatgcgcatgggaacgtgg

SEQ ID NO: 33294 - DNA, 21 bp, synthetic construct
  source 1..21: mol_type = other DNA; mol_type = other DNA
tgtattaagccaatgaccgca

SEQ ID NO: 33295 - DNA, 21 bp, synthetic construct
  source 1..21: mol_type = other DNA; mol_type = other DNA
acatgggatggttacgacgcg

SEQ ID NO: 33296 - DNA, 21 bp, synthetic construct
  source 1..21: mol_type = other DNA; mol_type = other DNA
tactcaagggggaacgacaat

SEQ ID NO: 33297 - DNA, 21 bp, synthetic construct
  source 1..21: mol_type = other DNA; mol_type = other DNA
agagacgatttcagtccatat

SEQ ID NO: 33298 - DNA, 21 bp, synthetic construct
  source 1..21: mol_type = other DNA; mol_type = other DNA
agggaagagatagttcgctgg

SEQ ID NO: 33299 - DNA, 21 bp, synthetic construct
  source 1..21: mol_type = other DNA; mol_type = other DNA
gagtcttcttcacgtacatgg

SEQ ID NO: 33300 - DNA, 21 bp, synthetic construct
  source 1..21: mol_type = other DNA; mol_type = other DNA
tgggacgtcggtacttggaat

SEQ ID NO: 33301 - DNA, 21 bp, synthetic construct
  source 1..21: mol_type = other DNA; mol_type = other DNA
tatgttcgtagtcagcctcag

SEQ ID NO: 33302 - DNA, 21 bp, synthetic construct
  source 1..21: mol_type = other DNA; mol_type = other DNA
cgtaatgagtttagtgggttt

SEQ ID NO: 33303 - DNA, 21 bp, synthetic construct
  source 1..21: mol_type = other DNA; mol_type = other DNA
tgcaaacctcaagctcttact

SEQ ID NO: 33304 - DNA, 21 bp, synthetic construct
  source 1..21: mol_type = other DNA; mol_type = other DNA
tacttttccggccaacaatca

SEQ ID NO: 33305 - DNA, 21 bp, synthetic construct
  source 1..21: mol_type = other DNA; mol_type = other DNA
ttaagtcgcatgaacgataac

SEQ ID NO: 33306 - DNA, 21 bp, synthetic construct
  source 1..21: mol_type = other DNA; mol_type = other DNA
tattggcagggcaagatagct

SEQ ID NO: 33307 - DNA, 21 bp, synthetic construct
  source 1..21: mol_type = other DNA; mol_type = other DNA
tacagtagaatgaatactaac

SEQ ID NO: 33308 - DNA, 21 bp, synthetic construct
  source 1..21: mol_type = other DNA; mol_type = other DNA
tattctagaagtggatttaac

SEQ ID NO: 33309 - DNA, 21 bp, synthetic construct
  source 1..21: mol_type = other DNA; mol_type = other DNA
tataagagtaacaccacgtgt

SEQ ID NO: 33310 - DNA, 21 bp, synthetic construct
  source 1..21: mol_type = other DNA; mol_type = other DNA
aatgcgcttgactggcgtgac

SEQ ID NO: 33311 - DNA, 21 bp, synthetic construct
  source 1..21: mol_type = other DNA; mol_type = other DNA
tgccggccccaaacaccgagt

SEQ ID NO: 33312 - DNA, 21 bp, synthetic construct
  source 1..21: mol_type = other DNA; mol_type = other DNA
aggcctgagacctgtccgagg

SEQ ID NO: 33313 - DNA, 21 bp, synthetic construct
  source 1..21: mol_type = other DNA; mol_type = other DNA
tttttcacggggaagctcgat

SEQ ID NO: 33314 - DNA, 21 bp, synthetic construct
  source 1..21: mol_type = other DNA; mol_type = other DNA
ttctcgaaagctggctataac

SEQ ID NO: 33315 - DNA, 21 bp, synthetic construct
  source 1..21: mol_type = other DNA; mol_type = other DNA
agagatgaattcctatcgtat

SEQ ID NO: 33316 - DNA, 21 bp, synthetic construct
  source 1..21: mol_type = other DNA; mol_type = other DNA
tattccagaactaacgagaac

SEQ ID NO: 33317 - DNA, 21 bp, synthetic construct
  source 1..21: mol_type = other DNA; mol_type = other DNA
cattttagtaccaacgggatc

SEQ ID NO: 33318 - DNA, 21 bp, synthetic construct
  source 1..21: mol_type = other DNA; mol_type = other DNA
tactacacaggtgttaaagga

SEQ ID NO: 33319 - DNA, 21 bp, synthetic construct
  source 1..21: mol_type = other DNA; mol_type = other DNA
cgcgggcacgacgttttcccg

SEQ ID NO: 33320 - DNA, 21 bp, synthetic construct
  source 1..21: mol_type = other DNA; mol_type = other DNA
cgcagtgaattccgcacatat

SEQ ID NO: 33321 - DNA, 21 bp, synthetic construct
  source 1..21: mol_type = other DNA; mol_type = other DNA
cgagagggtactagcttatgg

SEQ ID NO: 33322 - DNA, 21 bp, synthetic construct
  source 1..21: mol_type = other DNA; mol_type = other DNA
tgcactagcaaggtagggcac

SEQ ID NO: 33323 - DNA, 21 bp, synthetic construct
  source 1..21: mol_type = other DNA; mol_type = other DNA
tgtaggcctcaggcgggcgct

SEQ ID NO: 33324 - DNA, 21 bp, synthetic construct
  source 1..21: mol_type = other DNA; mol_type = other DNA
tattattcaggctataaggat

SEQ ID NO: 33325 - DNA, 21 bp, synthetic construct
  source 1..21: mol_type = other DNA; mol_type = other DNA
cagcagtcaaccaatggtcgg

SEQ ID NO: 33326 - DNA, 21 bp, synthetic construct
  source 1..21: mol_type = other DNA; mol_type = other DNA
tttagccgtatgaacgtaaat

SEQ ID NO: 33327 - DNA, 21 bp, synthetic construct
  source 1..21: mol_type = other DNA; mol_type = other DNA
tgcaagatgcccggaatggat

SEQ ID NO: 33328 - DNA, 21 bp, synthetic construct
  source 1..21: mol_type = other DNA; mol_type = other DNA
tatttcactggcgttacggta

SEQ ID NO: 33329 - DNA, 21 bp, synthetic construct
  source 1..21: mol_type = other DNA; mol_type = other DNA
tatcataaattagacaatatg

SEQ ID NO: 33330 - DNA, 21 bp, synthetic construct
  source 1..21: mol_type = other DNA; mol_type = other DNA
cgcacgtacgacacgtatgca

SEQ ID NO: 33331 - DNA, 21 bp, synthetic construct
  source 1..21: mol_type = other DNA; mol_type = other DNA
tggttcagcggaaaggtcgac

SEQ ID NO: 33332 - DNA, 21 bp, synthetic construct
  source 1..21: mol_type = other DNA; mol_type = other DNA
tatgcgcgccagggctcgaac

SEQ ID NO: 33333 - DNA, 21 bp, synthetic construct
  source 1..21: mol_type = other DNA; mol_type = other DNA
gtattgcatagttccaattgg

SEQ ID NO: 33334 - DNA, 21 bp, synthetic construct
  source 1..21: mol_type = other DNA; mol_type = other DNA
tacagccgatttcatttgaat

SEQ ID NO: 33335 - DNA, 21 bp, synthetic construct
  source 1..21: mol_type = other DNA; mol_type = other DNA
ttcaccaaatcgtgtccagtg

SEQ ID NO: 33336 - DNA, 21 bp, synthetic construct
  source 1..21: mol_type = other DNA; mol_type = other DNA
atcggggttaaaggctgggat

SEQ ID NO: 33337 - DNA, 21 bp, synthetic construct
  source 1..21: mol_type = other DNA; mol_type = other DNA
tacgccagaagcaatgacaac

SEQ ID NO: 33338 - DNA, 21 bp, synthetic construct
  source 1..21: mol_type = other DNA; mol_type = other DNA
tactcccgcaataatatcaat

SEQ ID NO: 33339 - DNA, 21 bp, synthetic construct
  source 1..21: mol_type = other DNA; mol_type = other DNA
tattctcgtgtcaacatgaac

SEQ ID NO: 33340 - DNA, 21 bp, synthetic construct
  source 1..21: mol_type = other DNA; mol_type = other DNA
cagtacgcgcgttctatgatg

SEQ ID NO: 33341 - DNA, 21 bp, synthetic construct
  source 1..21: mol_type = other DNA; mol_type = other DNA
cgcgagggaacgtccagctgg

SEQ ID NO: 33342 - DNA, 21 bp, synthetic construct
  source 1..21: mol_type = other DNA; mol_type = other DNA
tacttcgcgggtaaacaggaa

SEQ ID NO: 33343 - DNA, 21 bp, synthetic construct
  source 1..21: mol_type = other DNA; mol_type = other DNA
ttctctcggttgggggtgaat

SEQ ID NO: 33344 - DNA, 21 bp, synthetic construct
  source 1..21: mol_type = other DNA; mol_type = other DNA
ggaaacgctaccagccactgg

SEQ ID NO: 33345 - DNA, 21 bp, synthetic construct
  source 1..21: mol_type = other DNA; mol_type = other DNA
tactgggccgggattactgag

SEQ ID NO: 33346 - DNA, 21 bp, synthetic construct
  source 1..21: mol_type = other DNA; mol_type = other DNA
cgcgatgacggaagttactgg

SEQ ID NO: 33347 - DNA, 21 bp, synthetic construct
  source 1..21: mol_type = other DNA; mol_type = other DNA
tatgctaagatcggatttaat

SEQ ID NO: 33348 - DNA, 21 bp, synthetic construct
  source 1..21: mol_type = other DNA; mol_type = other DNA
tgtaaacctcccatgttcgaa

SEQ ID NO: 33349 - DNA, 21 bp, synthetic construct
  source 1..21: mol_type = other DNA; mol_type = other DNA
tattggagtgcggtgacggaa

SEQ ID NO: 33350 - DNA, 21 bp, synthetic construct
  source 1..21: mol_type = other DNA; mol_type = other DNA
tacgcgaagtcgaaccccaac

SEQ ID NO: 33351 - DNA, 21 bp, synthetic construct
  source 1..21: mol_type = other DNA; mol_type = other DNA
tgcgccaaacaatgcaaacct

SEQ ID NO: 33352 - DNA, 21 bp, synthetic construct
  source 1..21: mol_type = other DNA; mol_type = other DNA
tgtaataaaccgagtacagct

SEQ ID NO: 33353 - DNA, 21 bp, synthetic construct
  source 1..21: mol_type = other DNA; mol_type = other DNA
tgcaagcccgtaaaaggcgag

SEQ ID NO: 33354 - DNA, 21 bp, synthetic construct
  source 1..21: mol_type = other DNA; mol_type = other DNA
tatgcgaaaggaaatgcaaat

SEQ ID NO: 33355 - DNA, 21 bp, synthetic construct
  source 1..21: mol_type = other DNA; mol_type = other DNA
tacttctcaggtactcatagt

SEQ ID NO: 33356 - DNA, 21 bp, synthetic construct
  source 1..21: mol_type = other DNA; mol_type = other DNA
tgcaagttgccaaagatggaa

SEQ ID NO: 33357 - DNA, 21 bp, synthetic construct
  source 1..21: mol_type = other DNA; mol_type = other DNA
tattggcacggcaagccagac

SEQ ID NO: 33358 - DNA, 21 bp, synthetic construct
  source 1..21: mol_type = other DNA; mol_type = other DNA
ggtgatgagtacgttgcattc

SEQ ID NO: 33359 - DNA, 21 bp, synthetic construct
  source 1..21: mol_type = other DNA; mol_type = other DNA
ccttatgcagccagccgcgat

SEQ ID NO: 33360 - DNA, 21 bp, synthetic construct
  source 1..21: mol_type = other DNA; mol_type = other DNA
gctggccatgaccgtgggtgg

SEQ ID NO: 33361 - DNA, 21 bp, synthetic construct
  source 1..21: mol_type = other DNA; mol_type = other DNA
tgggttcgttccgatactaaa

SEQ ID NO: 33362 - DNA, 21 bp, synthetic construct
  source 1..21: mol_type = other DNA; mol_type = other DNA
tattcgaggatgggtgagaac

SEQ ID NO: 33363 - DNA, 21 bp, synthetic construct
  source 1..21: mol_type = other DNA; mol_type = other DNA
cgcatggaagaagtatttccc

SEQ ID NO: 33364 - DNA, 21 bp, synthetic construct
  source 1..21: mol_type = other DNA; mol_type = other DNA
atgacaggaacttcgtgtcca

SEQ ID NO: 33365 - DNA, 21 bp, synthetic construct
  source 1..21: mol_type = other DNA; mol_type = other DNA
aatatgcaagaccgctcctgg

SEQ ID NO: 33366 - DNA, 21 bp, synthetic construct
  source 1..21: mol_type = other DNA; mol_type = other DNA
atgacagtagattgcagccgt

SEQ ID NO: 33367 - DNA, 21 bp, synthetic construct
  source 1..21: mol_type = other DNA; mol_type = other DNA
ccttatgcgaaatcagttgat

SEQ ID NO: 33368 - DNA, 21 bp, synthetic construct
  source 1..21: mol_type = other DNA; mol_type = other DNA
tatttcagtggtcagcaaagc

SEQ ID NO: 33369 - DNA, 21 bp, synthetic construct
  source 1..21: mol_type = other DNA; mol_type = other DNA
ttttggtccgggaagttagag

SEQ ID NO: 33370 - DNA, 21 bp, synthetic construct
  source 1..21: mol_type = other DNA; mol_type = other DNA
gacggatcaaacaagtcttgt

SEQ ID NO: 33371 - DNA, 21 bp, synthetic construct
  source 1..21: mol_type = other DNA; mol_type = other DNA
tgtaaacctatgcaaatgccg

SEQ ID NO: 33372 - DNA, 21 bp, synthetic construct
  source 1..21: mol_type = other DNA; mol_type = other DNA
tgcaagcccgggtcgccccat

SEQ ID NO: 33373 - DNA, 21 bp, synthetic construct
  source 1..21: mol_type = other DNA; mol_type = other DNA
gggggtgaagcgagccgttgg

SEQ ID NO: 33374 - DNA, 21 bp, synthetic construct
  source 1..21: mol_type = other DNA; mol_type = other DNA
tacgcccgagcaggtatgaat

SEQ ID NO: 33375 - DNA, 21 bp, synthetic construct
  source 1..21: mol_type = other DNA; mol_type = other DNA
atggaagactatgttagctat

SEQ ID NO: 33376 - DNA, 21 bp, synthetic construct
  source 1..21: mol_type = other DNA; mol_type = other DNA
gtcttaacaagccagatttgg

SEQ ID NO: 33377 - DNA, 21 bp, synthetic construct
  source 1..21: mol_type = other DNA; mol_type = other DNA
gtaggaagctcgaatggtgtt

SEQ ID NO: 33378 - DNA, 21 bp, synthetic construct
  source 1..21: mol_type = other DNA; mol_type = other DNA
tatagccggcaaaacatgaac

SEQ ID NO: 33379 - DNA, 21 bp, synthetic construct
  source 1..21: mol_type = other DNA; mol_type = other DNA
tgcaagcctggggccgccagc

SEQ ID NO: 33380 - DNA, 21 bp, synthetic construct
  source 1..21: mol_type = other DNA; mol_type = other DNA
aagtacgatcatgtaacatgg

SEQ ID NO: 33381 - DNA, 21 bp, synthetic construct
  source 1..21: mol_type = other DNA; mol_type = other DNA
tatgaacctgggtgcaaaatt

SEQ ID NO: 33382 - DNA, 21 bp, synthetic construct
  source 1..21: mol_type = other DNA; mol_type = other DNA
tacagtaggataaatatgaat

SEQ ID NO: 33383 - DNA, 21 bp, synthetic construct
  source 1..21: mol_type = other DNA; mol_type = other DNA
ttttggagtggtataccggag

SEQ ID NO: 33384 - DNA, 21 bp, synthetic construct
  source 1..21: mol_type = other DNA; mol_type = other DNA
tacacgaggtcacagacggag

SEQ ID NO: 33385 - DNA, 21 bp, synthetic construct
  source 1..21: mol_type = other DNA; mol_type = other DNA
ctcgctcgaatgggggtaaat

SEQ ID NO: 33386 - DNA, 21 bp, synthetic construct
  source 1..21: mol_type = other DNA
cattgtccaacaataccaatg

SEQ ID NO: 33387 - DNA, 21 bp, synthetic construct
  source 1..21: mol_type = other DNA
agagctttcgatagctatccc

SEQ ID NO: 33388 - DNA, 21 bp, synthetic construct
  source 1..21: mol_type = other DNA
tgtaaagctactatacccgga

SEQ ID NO: 33389 - DNA, 21 bp, synthetic construct
  source 1..21: mol_type = other DNA; mol_type = other DNA
tactactcggggatccactcg

SEQ ID NO: 33390 - DNA, 21 bp, synthetic construct
  source 1..21: mol_type = other DNA; mol_type = other DNA
tattggtccgggacgaatgca

SEQ ID NO: 33391 - DNA, 21 bp, synthetic construct
  source 1..21: mol_type = other DNA; mol_type = other DNA
aaagacgacttcaatatattc

SEQ ID NO: 33392 - DNA, 21 bp, synthetic construct
  source 1..21: mol_type = other DNA; mol_type = other DNA
agaaacgagttcacatcatac

SEQ ID NO: 33393 - DNA, 21 bp, synthetic construct
  source 1..21: mol_type = other DNA; mol_type = other DNA
cgagatgattttgtttcattt

SEQ ID NO: 33394 - DNA, 21 bp, synthetic construct
  source 1..21: mol_type = other DNA; mol_type = other DNA
tgcaaagacaaccgagctttg

SEQ ID NO: 33395 - DNA, 21 bp, synthetic construct
  source 1..21: mol_type = other DNA; mol_type = other DNA
tattaccatgggattgccgca

SEQ ID NO: 33396 - DNA, 21 bp, synthetic construct
  source 1..21: mol_type = other DNA; mol_type = other DNA
tactttcatgggcgacccgat

SEQ ID NO: 33397 - DNA, 21 bp, synthetic construct
  source 1..21: mol_type = other DNA; mol_type = other DNA
gcccccgacacagtgaggtgg

SEQ ID NO: 33398 - DNA, 21 bp, synthetic construct
  source 1..21: mol_type = other DNA; mol_type = other DNA
tggtacagcggcgtgaaagcc

SEQ ID NO: 33399 - DNA, 21 bp, synthetic construct
  source 1..21: mol_type = other DNA; mol_type = other DNA
gtagactcaacgcatggggtc

SEQ ID NO: 33400 - DNA, 21 bp, synthetic construct
  source 1..21: mol_type = other DNA; mol_type = other DNA
tactctaaatataattataac

SEQ ID NO: 33401 - DNA, 21 bp, synthetic construct
  source 1..21: mol_type = other DNA; mol_type = other DNA
tttgtctccactaatggagta

SEQ ID NO: 33402 - DNA, 21 bp, synthetic construct
  source 1..21: mol_type = other DNA; mol_type = other DNA
ttacccaaaatggggtgtgcg

SEQ ID NO: 33403 - DNA, 21 bp, synthetic construct
  source 1..21: mol_type = other DNA; mol_type = other DNA
tgcaaggctcccaagtacgat

SEQ ID NO: 33404 - DNA, 21 bp, synthetic construct
  source 1..21: mol_type = other DNA; mol_type = other DNA
tgcatgagtgacaaacgcgca

SEQ ID NO: 33405 - DNA, 21 bp, synthetic construct
  source 1..21: mol_type = other DNA; mol_type = other DNA
tattcaagacaaaatgaaaac

SEQ ID NO: 33406 - DNA, 21 bp, synthetic construct
  source 1..21: mol_type = other DNA; mol_type = other DNA
taccatgccaaatcaccatgc

SEQ ID NO: 33407 - DNA, 21 bp, synthetic construct
  source 1..21: mol_type = other DNA; mol_type = other DNA
tatgcacgtggcggcactaat

SEQ ID NO: 33408 - DNA, 21 bp, synthetic construct
  source 1..21: mol_type = other DNA; mol_type = other DNA
tgcaagcccccctcaagggat

SEQ ID NO: 33409 - DNA, 21 bp, synthetic construct
  source 1..21: mol_type = other DNA; mol_type = other DNA
tgcaagccctcaggtgtcatg

SEQ ID NO: 33410 - DNA, 21 bp, synthetic construct
  source 1..21: mol_type = other DNA; mol_type = other DNA
tatagtagggtctcagtcaat

SEQ ID NO: 33411 - DNA, 21 bp, synthetic construct
  source 1..21: mol_type = other DNA; mol_type = other DNA
aagttcgacggaacagaatgc

SEQ ID NO: 33412 - DNA, 21 bp, synthetic construct
  source 1..21: mol_type = other DNA; mol_type = other DNA
cgtacttatgacacctatatc

SEQ ID NO: 33413 - DNA, 21 bp, synthetic construct
  source 1..21: mol_type = other DNA; mol_type = other DNA
aaggatgattacaccagattt

SEQ ID NO: 33414 - DNA, 21 bp, synthetic construct
  source 1..21: mol_type = other DNA; mol_type = other DNA
ttcttcagtggtcagattgcg

SEQ ID NO: 33415 - DNA, 21 bp, synthetic construct
  source 1..21: mol_type = other DNA; mol_type = other DNA
tactcacggaacaatccgaat

SEQ ID NO: 33416 - DNA, 21 bp, synthetic construct
  source 1..21: mol_type = other DNA; mol_type = other DNA
acgcagtcgagcaatggagtg

SEQ ID NO: 33417 - DNA, 21 bp, synthetic construct
  source 1..21: mol_type = other DNA; mol_type = other DNA
tacactcgacttaatccgatg

SEQ ID NO: 33418 - DNA, 21 bp, synthetic construct
  source 1..21: mol_type = other DNA; mol_type = other DNA
tatgctaaaaacggtagcaat

SEQ ID NO: 33419 - DNA, 21 bp, synthetic construct
  source 1..21: mol_type = other DNA; mol_type = other DNA
tgtaaaagtgacagtaaagtt

SEQ ID NO: 33420 - DNA, 21 bp, synthetic construct
  source 1..21: mol_type = other DNA; mol_type = other DNA
aaaagcgattatatggtatac

SEQ ID NO: 33421 - DNA, 21 bp, synthetic construct
  source 1..21: mol_type = other DNA; mol_type = other DNA
tgcaaacctgagaggatgagt

SEQ ID NO: 33422 - DNA, 21 bp, synthetic construct
  source 1..21: mol_type = other DNA; mol_type = other DNA
acctgggatggggataacgct

SEQ ID NO: 33423 - DNA, 21 bp, synthetic construct
  source 1..21: mol_type = other DNA; mol_type = other DNA
ggcggcccaggctccgtgtgg

SEQ ID NO: 33424 - DNA, 21 bp, synthetic construct
  source 1..21: mol_type = other DNA; mol_type = other DNA
tgggtaaagtcacagcagtgc

SEQ ID NO: 33425 - DNA, 21 bp, synthetic construct
  source 1..21: mol_type = other DNA; mol_type = other DNA
tatgcaaggcagaatcataac

SEQ ID NO: 33426 - DNA, 21 bp, synthetic construct
  source 1..21: mol_type = other DNA; mol_type = other DNA
ctcagcaaaaataattacaac

SEQ ID NO: 33427 - DNA, 21 bp, synthetic construct
  source 1..21: mol_type = other DNA; mol_type = other DNA
ccatgcccggtaaagcctgac

SEQ ID NO: 33428 - DNA, 21 bp, synthetic construct
  source 1..21: mol_type = other DNA; mol_type = other DNA
tattcgcggagtaacgttaac

SEQ ID NO: 33429 - DNA, 21 bp, synthetic construct
  source 1..21: mol_type = other DNA; mol_type = other DNA
tatgcgcgcggaaacctgaac

SEQ ID NO: 33430 - DNA, 21 bp, synthetic construct
  source 1..21: mol_type = other DNA; mol_type = other DNA
gtcgctactctagggtgggac

SEQ ID NO: 33431 - DNA, 21 bp, synthetic construct
  source 1..21: mol_type = other DNA; mol_type = other DNA
tgcaggagtgaaacaaagttg

SEQ ID NO: 33432 - DNA, 21 bp, synthetic construct
  source 1..21: mol_type = other DNA; mol_type = other DNA
tacttcacaggcgcacatgaa

SEQ ID NO: 33433 - DNA, 21 bp, synthetic construct
  source 1..21: mol_type = other DNA; mol_type = other DNA
tttttcacggggagaatggat

SEQ ID NO: 33434 - DNA, 21 bp, synthetic construct
  source 1..21: mol_type = other DNA; mol_type = other DNA
tgcataatgaaaaaactcgag

SEQ ID NO: 33435 - DNA, 21 bp, synthetic construct
  source 1..21: mol_type = other DNA; mol_type = other DNA
tacgcccgagggaacatgaat

SEQ ID NO: 33436 - DNA, 21 bp, synthetic construct
  source 1..21: mol_type = other DNA; mol_type = other DNA
tgtaataaacctatgatggca

SEQ ID NO: 33437 - DNA, 21 bp, synthetic construct
  source 1..21: mol_type = other DNA; mol_type = other DNA
cgcgggggcgatagggcttgg

SEQ ID NO: 33438 - DNA, 21 bp, synthetic construct
  source 1..21: mol_type = other DNA; mol_type = other DNA
aacatgggagaccgcaaatgg

SEQ ID NO: 33439 - DNA, 21 bp, synthetic construct
  source 1..21: mol_type = other DNA; mol_type = other DNA
ggttggggcactaaatgcggg

SEQ ID NO: 33440 - DNA, 21 bp, synthetic construct
  source 1..21: mol_type = other DNA; mol_type = other DNA
tattttatgggtaggtcggac

SEQ ID NO: 33441 - DNA, 21 bp, synthetic construct
  source 1..21: mol_type = other DNA; mol_type = other DNA
tgcaaagttaaatcgggcgag

SEQ ID NO: 33442 - DNA, 21 bp, synthetic construct
  source 1..21: mol_type = other DNA; mol_type = other DNA
tacagcaaaatgggggagaac

SEQ ID NO: 33443 - DNA, 21 bp, synthetic construct
  source 1..21: mol_type = other DNA; mol_type = other DNA
gctacaagcacaaacggagta

SEQ ID NO: 33444 - DNA, 21 bp, synthetic construct
  source 1..21: mol_type = other DNA; mol_type = other DNA
accacttctcagaatgggaga

SEQ ID NO: 33445 - DNA, 21 bp, synthetic construct
  source 1..21: mol_type = other DNA; mol_type = other DNA
atgaataattcaaccaaatgt

SEQ ID NO: 33446 - DNA, 21 bp, synthetic construct
  source 1..21: mol_type = other DNA; mol_type = other DNA
gggatagagcatgtcaggtgg

SEQ ID NO: 33447 - DNA, 21 bp, synthetic construct
  source 1..21: mol_type = other DNA; mol_type = other DNA
tctgatggggcttccaaatgg

SEQ ID NO: 33448 - DNA, 21 bp, synthetic construct
  source 1..21: mol_type = other DNA; mol_type = other DNA
tgccaaaaaccaatgacggca

SEQ ID NO: 33449 - DNA, 21 bp, synthetic construct
  source 1..21: mol_type = other DNA; mol_type = other DNA
tattttaccggcaacatagat

SEQ ID NO: 33450 - DNA, 21 bp, synthetic construct
  source 1..21: mol_type = other DNA; mol_type = other DNA
tattacactggaagagcggag

SEQ ID NO: 33451 - DNA, 21 bp, synthetic construct
  source 1..21: mol_type = other DNA; mol_type = other DNA
tgtaatacccctatgaccgct

SEQ ID NO: 33452 - DNA, 21 bp, synthetic construct
  source 1..21: mol_type = other DNA; mol_type = other DNA
aaaaaggaccattcctgtgat

SEQ ID NO: 33453 - DNA, 21 bp, synthetic construct
  source 1..21: mol_type = other DNA; mol_type = other DNA
atggacgactgggtcgtctac

SEQ ID NO: 33454 - DNA, 21 bp, synthetic construct
  source 1..21: mol_type = other DNA; mol_type = other DNA
atcggcgaaagggggtgggac

SEQ ID NO: 33455 - DNA, 21 bp, synthetic construct
  source 1..21: mol_type = other DNA; mol_type = other DNA
ggcatccggaacgtgatgtat

SEQ ID NO: 33456 - DNA, 21 bp, synthetic construct
  source 1..21: mol_type = other DNA; mol_type = other DNA
tgcaagagcgtatgcaagccc

SEQ ID NO: 33457 - DNA, 21 bp, synthetic construct
  source 1..21: mol_type = other DNA; mol_type = other DNA
aaaaatgattataactcgtgg

SEQ ID NO: 33458 - DNA, 21 bp, synthetic construct
  source 1..21: mol_type = other DNA; mol_type = other DNA
cgctcggacactgtatattgg

SEQ ID NO: 33459 - DNA, 21 bp, synthetic construct
  source 1..21: mol_type = other DNA; mol_type = other DNA
gatctacagtcatcatcttgg

SEQ ID NO: 33460 - DNA, 21 bp, synthetic construct
  source 1..21: mol_type = other DNA; mol_type = other DNA
gagacgccaatgtgtaaggcg

SEQ ID NO: 33461 - DNA, 21 bp, synthetic construct
  source 1..21: mol_type = other DNA; mol_type = other DNA
agagaccctggagtcaggtgg

SEQ ID NO: 33462 - DNA, 21 bp, synthetic construct
  source 1..21: mol_type = other DNA; mol_type = other DNA
tactctagagcgggagggtca

SEQ ID NO: 33463 - DNA, 21 bp, synthetic construct
  source 1..21: mol_type = other DNA; mol_type = other DNA
tgtcgcccagggacgcccggc

SEQ ID NO: 33464 - DNA, 21 bp, synthetic construct
  source 1..21: mol_type = other DNA; mol_type = other DNA
tttaaaggctcgtgtgaacag

SEQ ID NO: 33465 - DNA, 21 bp, synthetic construct
  source 1..21: mol_type = other DNA; mol_type = other DNA
gattcagcatccagagcatgg

SEQ ID NO: 33466 - DNA, 21 bp, synthetic construct
  source 1..21: mol_type = other DNA; mol_type = other DNA
tgcatgcccgattacagggag

SEQ ID NO: 33467 - DNA, 21 bp, synthetic construct
  source 1..21: mol_type = other DNA; mol_type = other DNA
cgcgacgattttgtatcattt

SEQ ID NO: 33468 - DNA, 21 bp, synthetic construct
  source 1..21: mol_type = other DNA; mol_type = other DNA
ttcttcacgggaaagatggac

SEQ ID NO: 33469 - DNA, 21 bp, synthetic construct
  source 1..21: mol_type = other DNA; mol_type = other DNA
atgagtagagttagcaacaac

SEQ ID NO: 33470 - DNA, 21 bp, synthetic construct
  source 1..21: mol_type = other DNA; mol_type = other DNA
tgggcgagaggttgtgataac

SEQ ID NO: 33471 - DNA, 21 bp, synthetic construct
  source 1..21: mol_type = other DNA; mol_type = other DNA
aactgcaagccgtgtctcacc

SEQ ID NO: 33472 - DNA, 21 bp, synthetic construct
  source 1..21: mol_type = other DNA; mol_type = other DNA
ttggtccgctacgaaaatgtt

SEQ ID NO: 33473 - DNA, 21 bp, synthetic construct
  source 1..21: mol_type = other DNA; mol_type = other DNA
acatatagtggggatcccgct

SEQ ID NO: 33474 - DNA, 21 bp, synthetic construct
  source 1..21: mol_type = other DNA; mol_type = other DNA
ggatcagagtttgaaaaatgg

SEQ ID NO: 33475 - DNA, 21 bp, synthetic construct
  source 1..21: mol_type = other DNA; mol_type = other DNA
tacgcaagacagaattataat

SEQ ID NO: 33476 - DNA, 21 bp, synthetic construct
  source 1..21: mol_type = other DNA; mol_type = other DNA
tgtcgcagtggtcctactcca

SEQ ID NO: 33477 - DNA, 21 bp, synthetic construct
  source 1..21: mol_type = other DNA; mol_type = other DNA
tattcaaggatggggcacaac

SEQ ID NO: 33478 - DNA, 21 bp, synthetic construct
  source 1..21: mol_type = other DNA; mol_type = other DNA
tatagccgcgttaattacaac

SEQ ID NO: 33479 - DNA, 21 bp, synthetic construct
  source 1..21: mol_type = other DNA; mol_type = other DNA
tacgctaaacaaggccacaac

SEQ ID NO: 33480 - DNA, 21 bp, synthetic construct
  source 1..21: mol_type = other DNA; mol_type = other DNA
tgtaacaagcgatcgggagaa

SEQ ID NO: 33481 - DNA, 21 bp, synthetic construct
  source 1..21: mol_type = other DNA; mol_type = other DNA
tatggcaagagcacggaatgc

SEQ ID NO: 33482 - DNA, 21 bp, synthetic construct
  source 1..21: mol_type = other DNA; mol_type = other DNA
tgcaaaccgacaagcatagaa

SEQ ID NO: 33483 - DNA, 21 bp, synthetic construct
  source 1..21: mol_type = other DNA; mol_type = other DNA
tattggaccggcactatggag

SEQ ID NO: 33484 - DNA, 21 bp, synthetic construct
  source 1..21: mol_type = other DNA; mol_type = other DNA
gatctacaaagtagcaattgg

SEQ ID NO: 33485 - DNA, 21 bp, synthetic construct
  source 1..21: mol_type = other DNA; mol_type = other DNA
tttttttcaggacaaatagca

SEQ ID NO: 33486 - DNA, 21 bp, synthetic construct
  source 1..21: mol_type = other DNA; mol_type = other DNA
gtcctgagcgaacgaagttgg

SEQ ID NO: 33487 - DNA, 21 bp, synthetic construct
  source 1..21: mol_type = other DNA; mol_type = other DNA
tacgccaggggaaatgtgaat

SEQ ID NO: 33488 - DNA, 21 bp, synthetic construct
  source 1..21: mol_type = other DNA; mol_type = other DNA
tattggtcaggacaacacgcg

SEQ ID NO: 33489 - DNA, 21 bp, synthetic construct
  source 1..21: mol_type = other DNA; mol_type = other DNA
ttttttagtggggtcgtcaag

SEQ ID NO: 33490 - DNA, 21 bp, synthetic construct
  source 1..21: mol_type = other DNA; mol_type = other DNA
atttgccgtccgtgctcagag

SEQ ID NO: 33491 - DNA, 21 bp, synthetic construct
  source 1..21: mol_type = other DNA; mol_type = other DNA
tggccatttggcgtagacgcc

SEQ ID NO: 33492 - DNA, 21 bp, synthetic construct
  source 1..21: mol_type = other DNA; mol_type = other DNA
tgtaaagaagggacaaggggg

SEQ ID NO: 33493 - DNA, 21 bp, synthetic construct
  source 1..21: mol_type = other DNA; mol_type = other DNA
cccgatggttcctgtaaagcg

SEQ ID NO: 33494 - DNA, 21 bp, synthetic construct
  source 1..21: mol_type = other DNA; mol_type = other DNA
tgtgccccagattataggatc

SEQ ID NO: 33495 - DNA, 21 bp, synthetic construct
  source 1..21: mol_type = other DNA; mol_type = other DNA
tatttcacaggaatggtccag

SEQ ID NO: 33496 - DNA, 21 bp, synthetic construct
  source 1..21: mol_type = other DNA; mol_type = other DNA
agaatgcaggaccggtcgtgg

SEQ ID NO: 33497 - DNA, 21 bp, synthetic construct
  source 1..21: mol_type = other DNA; mol_type = other DNA
tggtttactggcgtgaaagag

SEQ ID NO: 33498 - DNA, 21 bp, synthetic construct
  source 1..21: mol_type = other DNA; mol_type = other DNA
tattccaaatataatatcaac

SEQ ID NO: 33499 - DNA, 21 bp, synthetic construct
  source 1..21: mol_type = other DNA; mol_type = other DNA
tgcagtaaagaaaccatgtcg

SEQ ID NO: 33500 - DNA, 21 bp, synthetic construct
  source 1..21: mol_type = other DNA; mol_type = other DNA
atgatgcaggaccgtagttgg

SEQ ID NO: 33501 - DNA, 21 bp, synthetic construct
  source 1..21: mol_type = other DNA; mol_type = other DNA
tacgcaaaggccgggatgaat

SEQ ID NO: 33502 - DNA, 21 bp, synthetic construct
  source 1..21: mol_type = other DNA; mol_type = other DNA
tgcaaaccagtcccgccagag

SEQ ID NO: 33503 - DNA, 21 bp, synthetic construct
  source 1..21: mol_type = other DNA; mol_type = other DNA
ggcggaaatggcagtacgtgg

SEQ ID NO: 33504 - DNA, 21 bp, synthetic construct
  source 1..21: mol_type = other DNA; mol_type = other DNA
ttcgctcgtcatggccacaat

SEQ ID NO: 33505 - DNA, 21 bp, synthetic construct
  source 1..21: mol_type = other DNA; mol_type = other DNA
gggtgtggcacgaagaacggc

SEQ ID NO: 33506 - DNA, 21 bp, synthetic construct
  source 1..21: mol_type = other DNA; mol_type = other DNA
tactggtcgggtagggttgac

SEQ ID NO: 33507 - DNA, 21 bp, synthetic construct
  source 1..21: mol_type = other DNA; mol_type = other DNA
tatgcgaggagcaattttaat

SEQ ID NO: 33508 - DNA, 21 bp, synthetic construct
  source 1..21: mol_type = other DNA; mol_type = other DNA
agggaagaggaagtagcgtgg

SEQ ID NO: 33509 - DNA, 21 bp, synthetic construct
  source 1..21: mol_type = other DNA; mol_type = other DNA
tatgcgaaacaaggtaacaat

SEQ ID NO: 33510 - DNA, 21 bp, synthetic construct
  source 1..21: mol_type = other DNA; mol_type = other DNA
tgtaagatgcccggtagagat

SEQ ID NO: 33511 - DNA, 21 bp, synthetic construct
  source 1..21: mol_type = other DNA; mol_type = other DNA
cgagagtacaacgtgtaccca

SEQ ID NO: 33512 - DNA, 21 bp, synthetic construct
  source 1..21: mol_type = other DNA; mol_type = other DNA
tatttcacgggccacccggag

SEQ ID NO: 33513 - DNA, 21 bp, synthetic construct
  source 1..21: mol_type = other DNA; mol_type = other DNA
ctaagccgtatcaatttcaac

SEQ ID NO: 33514 - DNA, 21 bp, synthetic construct
  source 1..21: mol_type = other DNA; mol_type = other DNA
ggtggaagtggcagtacatgg

SEQ ID NO: 33515 - DNA, 21 bp, synthetic construct
  source 1..21: mol_type = other DNA; mol_type = other DNA
agggaggagactgtagggtgg

SEQ ID NO: 33516 - DNA, 21 bp, synthetic construct
  source 1..21: mol_type = other DNA; mol_type = other DNA
tgtaaaccaccgagccgcgac

SEQ ID NO: 33517 - DNA, 21 bp, synthetic construct
  source 1..21: mol_type = other DNA; mol_type = other DNA
tgtaaaccccaagtcgttggc

SEQ ID NO: 33518 - DNA, 21 bp, synthetic construct
  source 1..21: mol_type = other DNA; mol_type = other DNA
actagaaatggccaggagtgt

SEQ ID NO: 33519 - DNA, 21 bp, synthetic construct
  source 1..21: mol_type = other DNA; mol_type = other DNA
tatgcacgacagggctacaat

SEQ ID NO: 33520 - DNA, 21 bp, synthetic construct
  source 1..21: mol_type = other DNA; mol_type = other DNA
tactcccgtgcaaatatgaac

SEQ ID NO: 33521 - DNA, 21 bp, synthetic construct
  source 1..21: mol_type = other DNA; mol_type = other DNA
tacgcccgattaaacgataat

SEQ ID NO: 33522 - DNA, 21 bp, synthetic construct
  source 1..21: mol_type = other DNA; mol_type = other DNA
gggcacggcactaaatgcggt

SEQ ID NO: 33523 - DNA, 21 bp, synthetic construct
  source 1..21: mol_type = other DNA; mol_type = other DNA
agggaagatttccagacctgg

SEQ ID NO: 33524 - DNA, 21 bp, synthetic construct
  source 1..21: mol_type = other DNA; mol_type = other DNA
ataaaggattacaaaggttgt

SEQ ID NO: 33525 - DNA, 21 bp, synthetic construct
  source 1..21: mol_type = other DNA; mol_type = other DNA
tgcaagccgaatagcggaggt

SEQ ID NO: 33526 - DNA, 21 bp, synthetic construct
  source 1..21: mol_type = other DNA; mol_type = other DNA
gggggaggcacatcgagctgg

SEQ ID NO: 33527 - DNA, 21 bp, synthetic construct
  source 1..21: mol_type = other DNA; mol_type = other DNA
ttcaggtcgacgaatggcgta

SEQ ID NO: 33528 - DNA, 21 bp, synthetic construct
  source 1..21: mol_type = other DNA; mol_type = other DNA
tgcaggccagaaggagcttgt

SEQ ID NO: 33529 - DNA, 21 bp, synthetic construct
  source 1..21: mol_type = other DNA; mol_type = other DNA
tgccgtcctgggtcacctggc

SEQ ID NO: 33530 - DNA, 21 bp, synthetic construct
  source 1..21: mol_type = other DNA; mol_type = other DNA
ttttccaaacttaaccccgac

SEQ ID NO: 33531 - DNA, 21 bp, synthetic construct
  source 1..21: mol_type = other DNA; mol_type = other DNA
tgcgtacagacgaaaaaggag

SEQ ID NO: 33532 - DNA, 21 bp, synthetic construct
  source 1..21: mol_type = other DNA; mol_type = other DNA
ttctctaggatgaatattaac

SEQ ID NO: 33533 - DNA, 21 bp, synthetic construct
  source 1..21: mol_type = other DNA; mol_type = other DNA
atgcaccgcctttctgagaga

SEQ ID NO: 33534 - DNA, 21 bp, synthetic construct
  source 1..21: mol_type = other DNA; mol_type = other DNA
tattttgctgggaagcaagag

SEQ ID NO: 33535 - DNA, 21 bp, synthetic construct
  source 1..21: mol_type = other DNA; mol_type = other DNA
ttttggtcaggcatgaaggac

SEQ ID NO: 33536 - DNA, 21 bp, synthetic construct
  source 1..21: mol_type = other DNA; mol_type = other DNA
gagagtgaatttaaaacgtat

SEQ ID NO: 33537 - DNA, 21 bp, synthetic construct
  source 1..21: mol_type = other DNA; mol_type = other DNA
tgcaagatggggagggatgaa

SEQ ID NO: 33538 - DNA, 21 bp, synthetic construct
  source 1..21: mol_type = other DNA; mol_type = other DNA
agaggtccggacactttccca

SEQ ID NO: 33539 - DNA, 21 bp, synthetic construct
  source 1..21: mol_type = other DNA; mol_type = other DNA
ggaggtgagagctgtaagtct

SEQ ID NO: 33540 - DNA, 21 bp, synthetic construct
  source 1..21: mol_type = other DNA; mol_type = other DNA
tatgccaagcagggagcaaat

SEQ ID NO: 33541 - DNA, 21 bp, synthetic construct
  source 1..21: mol_type = other DNA; mol_type = other DNA
tatttccacggaaggccggac

SEQ ID NO: 33542 - DNA, 21 bp, synthetic construct
  source 1..21: mol_type = other DNA; mol_type = other DNA
aaagatggtaattcgtcatgg

SEQ ID NO: 33543 - DNA, 21 bp, synthetic construct
  source 1..21: mol_type = other DNA; mol_type = other DNA
tatttcactcgtgtcatggaa

SEQ ID NO: 33544 - DNA, 21 bp, synthetic construct
  source 1..21: mol_type = other DNA; mol_type = other DNA
ttcagcagggcaggcttaaat

SEQ ID NO: 33545 - DNA, 21 bp, synthetic construct
  source 1..21: mol_type = other DNA; mol_type = other DNA
tactcaagaggaaatacaaac

SEQ ID NO: 33546 - DNA, 21 bp, synthetic construct
  source 1..21: mol_type = other DNA; mol_type = other DNA
tgtgggtctgtacaagtcaac

SEQ ID NO: 33547 - DNA, 21 bp, synthetic construct
  source 1..21: mol_type = other DNA; mol_type = other DNA
gaactttcatcgccaaagtgg

SEQ ID NO: 33548 - DNA, 21 bp, synthetic construct
  source 1..21: mol_type = other DNA; mol_type = other DNA
gtctctgagtataagacattt

SEQ ID NO: 33549 - DNA, 21 bp, synthetic construct
  source 1..21: mol_type = other DNA; mol_type = other DNA
tactttacgaacgttaaggag

SEQ ID NO: 33550 - DNA, 21 bp, synthetic construct
  source 1..21: mol_type = other DNA; mol_type = other DNA
tgcaagccgatgatgggtgag

SEQ ID NO: 33551 - DNA, 21 bp, synthetic construct
  source 1..21: mol_type = other DNA; mol_type = other DNA
tactggcatggaaaacccgaa

SEQ ID NO: 33552 - DNA, 21 bp, synthetic construct
  source 1..21: mol_type = other DNA; mol_type = other DNA
ggcgggccggggagcgcttgg

SEQ ID NO: 33553 - DNA, 21 bp, synthetic construct
  source 1..21: mol_type = other DNA; mol_type = other DNA
tgtaccagcatcacaggacac

SEQ ID NO: 33554 - DNA, 21 bp, synthetic construct
  source 1..21: mol_type = other DNA; mol_type = other DNA
tacacacgattgtcatacgac

SEQ ID NO: 33555 - DNA, 21 bp, synthetic construct
  source 1..21: mol_type = other DNA; mol_type = other DNA
aaagatggctacacagtatac

SEQ ID NO: 33556 - DNA, 21 bp, synthetic construct
  source 1..21: mol_type = other DNA; mol_type = other DNA
tactggtcgggtcgaaatgaa

SEQ ID NO: 33557 - DNA, 21 bp, synthetic construct
  source 1..21: mol_type = other DNA; mol_type = other DNA
tacagtcgtcataacttgaat

SEQ ID NO: 33558 - DNA, 21 bp, synthetic construct
  source 1..21: mol_type = other DNA; mol_type = other DNA
tactggactgggcagatggac

SEQ ID NO: 33559 - DNA, 21 bp, synthetic construct
  source 1..21: mol_type = other DNA; mol_type = other DNA
tattccaaagtcaatttcaac

SEQ ID NO: 33560 - DNA, 21 bp, synthetic construct
  source 1..21: mol_type = other DNA; mol_type = other DNA
agtgatggatcatcaaagtgg

SEQ ID NO: 33561 - DNA, 21 bp, synthetic construct
  source 1..21: mol_type = other DNA; mol_type = other DNA
attacaagtgataacggtaga

SEQ ID NO: 33562 - DNA, 21 bp, synthetic construct
  source 1..21: mol_type = other DNA; mol_type = other DNA
tatttcacggccatagtcgag

SEQ ID NO: 33563 - DNA, 21 bp, synthetic construct
  source 1..21: mol_type = other DNA; mol_type = other DNA
atcacaggtgggaaaacatgc

SEQ ID NO: 33564 - DNA, 21 bp, synthetic construct
  source 1..21: mol_type = other DNA; mol_type = other DNA
tatttccaggggaagctggaa

SEQ ID NO: 33565 - DNA, 21 bp, synthetic construct
  source 1..21: mol_type = other DNA; mol_type = other DNA
gactatgcatactcaaaagag

SEQ ID NO: 33566 - DNA, 21 bp, synthetic construct
  source 1..21: mol_type = other DNA; mol_type = other DNA
tacagtcgccagaacacaaac

SEQ ID NO: 33567 - DNA, 21 bp, synthetic construct
  source 1..21: mol_type = other DNA; mol_type = other DNA
tacgcaagagggaacaataat

SEQ ID NO: 33568 - DNA, 21 bp, synthetic construct
  source 1..21: mol_type = other DNA; mol_type = other DNA
tattcacgcctttctgagttc

SEQ ID NO: 33569 - DNA, 21 bp, synthetic construct
  source 1..21: mol_type = other DNA; mol_type = other DNA
tacaatagtacaaacggcata

SEQ ID NO: 33570 - DNA, 21 bp, synthetic construct
  source 1..21: mol_type = other DNA; mol_type = other DNA
tgcaataaaccgcatacagca

SEQ ID NO: 33571 - DNA, 21 bp, synthetic construct
  source 1..21: mol_type = other DNA; mol_type = other DNA
agagaagaatttgtatcgtac

SEQ ID NO: 33572 - DNA, 21 bp, synthetic construct
  source 1..21: mol_type = other DNA; mol_type = other DNA
tattcacggatgaatcagaac

SEQ ID NO: 33573 - DNA, 21 bp, synthetic construct
  source 1..21: mol_type = other DNA; mol_type = other DNA
cgtgaatatgacagcttcccg

SEQ ID NO: 33574 - DNA, 21 bp, synthetic construct
  source 1..21: mol_type = other DNA; mol_type = other DNA
tttagtagacttaaccataac

SEQ ID NO: 33575 - DNA, 21 bp, synthetic construct
  source 1..21: mol_type = other DNA; mol_type = other DNA
agaaaccacgagacatttccg

SEQ ID NO: 33576 - DNA, 21 bp, synthetic construct
  source 1..21: mol_type = other DNA; mol_type = other DNA
tacgaagggggatgcaaggaa

SEQ ID NO: 33577 - DNA, 21 bp, synthetic construct
  source 1..21: mol_type = other DNA; mol_type = other DNA
ggggggccaggtagcgcctgg

SEQ ID NO: 33578 - DNA, 21 bp, synthetic construct
  source 1..21: mol_type = other DNA; mol_type = other DNA
tacagccgaattaataccaat

SEQ ID NO: 33579 - DNA, 21 bp, synthetic construct
  source 1..21: mol_type = other DNA; mol_type = other DNA
gtaccgcaggatcgggcatgg

SEQ ID NO: 33580 - DNA, 21 bp, synthetic construct
  source 1..21: mol_type = other DNA; mol_type = other DNA
tactgggagggtgtaaaagaa

SEQ ID NO: 33581 - DNA, 21 bp, synthetic construct
  source 1..21: mol_type = other DNA; mol_type = other DNA
agtatgcaagataggggctgg

SEQ ID NO: 33582 - DNA, 21 bp, synthetic construct
  source 1..21: mol_type = other DNA; mol_type = other DNA
tatagccgtataacacctaac

SEQ ID NO: 33583 - DNA, 21 bp, synthetic construct
  source 1..21: mol_type = other DNA; mol_type = other DNA
tatagcaagtacaattttaat

SEQ ID NO: 33584 - DNA, 21 bp, synthetic construct
  source 1..21: mol_type = other DNA; mol_type = other DNA
ggacaagactcggtcaagtgc

SEQ ID NO: 33585 - DNA, 21 bp, synthetic construct
  source 1..21: mol_type = other DNA; mol_type = other DNA
tactggaccggcaaacccgaa

SEQ ID NO: 33586 - DNA, 21 bp, synthetic construct
  source 1..21: mol_type = other DNA; mol_type = other DNA
tactggaagccggaggtcaat

SEQ ID NO: 33587 - DNA, 21 bp, synthetic construct
  source 1..21: mol_type = other DNA; mol_type = other DNA
aagcctgactgggtcgagttc

SEQ ID NO: 33588 - DNA, 21 bp, synthetic construct
  source 1..21: mol_type = other DNA; mol_type = other DNA
gcacttcccccgaagtgttcc

SEQ ID NO: 33589 - DNA, 21 bp, synthetic construct
  source 1..21: mol_type = other DNA; mol_type = other DNA
tatgcccgtctgaatgctaac

SEQ ID NO: 33590 - DNA, 21 bp, synthetic construct
  source 1..21: mol_type = other DNA; mol_type = other DNA
tacgccaagcatggctggaac

SEQ ID NO: 33591 - DNA, 21 bp, synthetic construct
  source 1..21: mol_type = other DNA; mol_type = other DNA
cgagaaggaaacagtctctgg

SEQ ID NO: 33592 - DNA, 21 bp, synthetic construct
  source 1..21: mol_type = other DNA
tgtgggcgctccggaacccac

SEQ ID NO: 33593 - DNA, 21 bp, synthetic construct
  source 1..21: mol_type = other DNA
tgcacaggaaagacaggacat

SEQ ID NO: 33594 - DNA, 21 bp, synthetic construct
  source 1..21: mol_type = other DNA
tttttcactggcatcgtaagc

SEQ ID NO: 33595 - DNA, 21 bp, synthetic construct
  source 1..21: mol_type = other DNA
atgaccggaacatcgtgtatg

SEQ ID NO: 33596 - DNA, 21 bp, synthetic construct
  source 1..21: mol_type = other DNA
ttgtcaagggccgggagagat

SEQ ID NO: 33597 - DNA, 21 bp, synthetic construct
  source 1..21: mol_type = other DNA
tatgctcgcgccggtatcaat

SEQ ID NO: 33598 - DNA, 21 bp, synthetic construct
  source 1..21: mol_type = other DNA
tacacgcatacccagcgcaac

SEQ ID NO: 33599 - DNA, 21 bp, synthetic construct
  source 1..21: mol_type = other DNA; mol_type = other DNA
tatttcagtgcagtgagggaa

SEQ ID NO: 33600 - DNA, 21 bp, synthetic construct
  source 1..21: mol_type = other DNA; mol_type = other DNA
tacgcaaaaggcggccataac

SEQ ID NO: 33601 - DNA, 21 bp, synthetic construct
  source 1..21: mol_type = other DNA; mol_type = other DNA
tattcaagaaaatctgacaac

SEQ ID NO: 33602 - DNA, 21 bp, synthetic construct
  source 1..21: mol_type = other DNA; mol_type = other DNA
tacctcatatcgcagtcgtat

SEQ ID NO: 33603 - DNA, 21 bp, synthetic construct
  source 1..21: mol_type = other DNA; mol_type = other DNA
tataattctacccacggcagg

SEQ ID NO: 33604 - DNA, 21 bp, synthetic construct
  source 1..21: mol_type = other DNA; mol_type = other DNA
ctcagcagaaccggagagaat

SEQ ID NO: 33605 - DNA, 21 bp, synthetic construct
  source 1..21: mol_type = other DNA; mol_type = other DNA
accccctatgacgctattgcc

SEQ ID NO: 33606 - DNA, 21 bp, synthetic construct
  source 1..21: mol_type = other DNA; mol_type = other DNA
atgatggatggcacaaatgca

SEQ ID NO: 33607 - DNA, 21 bp, synthetic construct
  source 1..21: mol_type = other DNA; mol_type = other DNA
ggctgcggtacaaaacagggg

SEQ ID NO: 33608 - DNA, 21 bp, synthetic construct
  source 1..21: mol_type = other DNA; mol_type = other DNA
tatgcgaggggcaatatgaac

SEQ ID NO: 33609 - DNA, 21 bp, synthetic construct
  source 1..21: mol_type = other DNA; mol_type = other DNA
ttttttaccggaaccgtggaa

SEQ ID NO: 33610 - DNA, 21 bp, synthetic construct
  source 1..21: mol_type = other DNA; mol_type = other DNA
aggaatgagttcacggcttat

SEQ ID NO: 33611 - DNA, 21 bp, synthetic construct
  source 1..21: mol_type = other DNA; mol_type = other DNA
tactttcatggccagctagct

SEQ ID NO: 33612 - DNA, 21 bp, synthetic construct
  source 1..21: mol_type = other DNA; mol_type = other DNA
tatttctccgggattcacact

SEQ ID NO: 33613 - DNA, 21 bp, synthetic construct
  source 1..21: mol_type = other DNA; mol_type = other DNA
cgcgatccctgcaccgtagac

SEQ ID NO: 33614 - DNA, 21 bp, synthetic construct
  source 1..21: mol_type = other DNA; mol_type = other DNA
aggacatatgacgcttttgcg

SEQ ID NO: 33615 - DNA, 21 bp, synthetic construct
  source 1..21: mol_type = other DNA; mol_type = other DNA
ggatcaggcacgagtacatgg

SEQ ID NO: 33616 - DNA, 21 bp, synthetic construct
  source 1..21: mol_type = other DNA; mol_type = other DNA
caaccgtccccctgcaaaccc

SEQ ID NO: 33617 - DNA, 21 bp, synthetic construct
  source 1..21: mol_type = other DNA; mol_type = other DNA
tacagcaggttagatgtattc

SEQ ID NO: 33618 - DNA, 21 bp, synthetic construct
  source 1..21: mol_type = other DNA; mol_type = other DNA
ggcgccgcaacgtctaagtgg

SEQ ID NO: 33619 - DNA, 21 bp, synthetic construct
  source 1..21: mol_type = other DNA; mol_type = other DNA
tattcacgtttagatagtttt

SEQ ID NO: 33620 - DNA, 21 bp, synthetic construct
  source 1..21: mol_type = other DNA; mol_type = other DNA
aacgctctggattggagagat

SEQ ID NO: 33621 - DNA, 21 bp, synthetic construct
  source 1..21: mol_type = other DNA; mol_type = other DNA
tactggtcaggcgttattgac

SEQ ID NO: 33622 - DNA, 21 bp, synthetic construct
  source 1..21: mol_type = other DNA; mol_type = other DNA
tatgcgcgagggaattacaat

SEQ ID NO: 33623 - DNA, 21 bp, synthetic construct
  source 1..21: mol_type = other DNA; mol_type = other DNA
cgcgaagaagcgattagatgg

SEQ ID NO: 33624 - DNA, 21 bp, synthetic construct
  source 1..21: mol_type = other DNA; mol_type = other DNA
tttttcacaggtgaacgcgct

SEQ ID NO: 33625 - DNA, 21 bp, synthetic construct
  source 1..21: mol_type = other DNA; mol_type = other DNA
gtgatgcaggaccgcagttgg

SEQ ID NO: 33626 - DNA, 21 bp, synthetic construct
  source 1..21: mol_type = other DNA; mol_type = other DNA
tttgcgcgcactggatgggat

SEQ ID NO: 33627 - DNA, 21 bp, synthetic construct
  source 1..21: mol_type = other DNA; mol_type = other DNA
tattcccggaatgggatcaac

SEQ ID NO: 33628 - DNA, 21 bp, synthetic construct
  source 1..21: mol_type = other DNA; mol_type = other DNA
attgcacggactggatgcgac

SEQ ID NO: 33629 - DNA, 21 bp, synthetic construct
  source 1..21: mol_type = other DNA; mol_type = other DNA
gtgcacaagctatgtccggtt

SEQ ID NO: 33630 - DNA, 21 bp, synthetic construct
  source 1..21: mol_type = other DNA; mol_type = other DNA
tactttcaagggacgtacaat

SEQ ID NO: 33631 - DNA, 21 bp, synthetic construct
  source 1..21: mol_type = other DNA; mol_type = other DNA
tacagtcgtagcggagaaaac

SEQ ID NO: 33632 - DNA, 21 bp, synthetic construct
  source 1..21: mol_type = other DNA; mol_type = other DNA
tacgctcgtggtgggcaaaac

SEQ ID NO: 33633 - DNA, 21 bp, synthetic construct
  source 1..21: mol_type = other DNA; mol_type = other DNA
tggtttactggcaggcacgac

SEQ ID NO: 33634 - DNA, 21 bp, synthetic construct
  source 1..21: mol_type = other DNA; mol_type = other DNA
atcttttcgacaaatggggtg

SEQ ID NO: 33635 - DNA, 21 bp, synthetic construct
  source 1..21: mol_type = other DNA; mol_type = other DNA
tgtggaaagtctggtcccagc

SEQ ID NO: 33636 - DNA, 21 bp, synthetic construct
  source 1..21: mol_type = other DNA; mol_type = other DNA
gaagggggcagctgcaaacct

SEQ ID NO: 33637 - DNA, 21 bp, synthetic construct
  source 1..21: mol_type = other DNA; mol_type = other DNA
gataatcggggtatgatagca

SEQ ID NO: 33638 - DNA, 21 bp, synthetic construct
  source 1..21: mol_type = other DNA; mol_type = other DNA
ttagggattggttgctgcaag

SEQ ID NO: 33639 - DNA, 21 bp, synthetic construct
  source 1..21: mol_type = other DNA; mol_type = other DNA
tggacaccaaactgtaaggcc

SEQ ID NO: 33640 - DNA, 21 bp, synthetic construct
  source 1..21: mol_type = other DNA; mol_type = other DNA
tgcggcccatacctacacgag

SEQ ID NO: 33641 - DNA, 21 bp, synthetic construct
  source 1..21: mol_type = other DNA; mol_type = other DNA
tggtggtcgggggtaactgag

SEQ ID NO: 33642 - DNA, 21 bp, synthetic construct
  source 1..21: mol_type = other DNA; mol_type = other DNA
tactgggaaggcgtacgagaa

SEQ ID NO: 33643 - DNA, 21 bp, synthetic construct
  source 1..21: mol_type = other DNA; mol_type = other DNA
tgtatgaaaagacccgaggta

SEQ ID NO: 33644 - DNA, 21 bp, synthetic construct
  source 1..21: mol_type = other DNA; mol_type = other DNA
ttcgcacgaaacggctacaat

SEQ ID NO: 33645 - DNA, 21 bp, synthetic construct
  source 1..21: mol_type = other DNA; mol_type = other DNA
agcgcgaacacagggcgatgt

SEQ ID NO: 33646 - DNA, 21 bp, synthetic construct
  source 1..21: mol_type = other DNA; mol_type = other DNA
tggtattcaggcgtaaaagag

SEQ ID NO: 33647 - DNA, 21 bp, synthetic construct
  source 1..21: mol_type = other DNA; mol_type = other DNA
ggttcacctgggtctcattgg

SEQ ID NO: 33648 - DNA, 21 bp, synthetic construct
  source 1..21: mol_type = other DNA; mol_type = other DNA
tacagcagatctaacatgaat

SEQ ID NO: 33649 - DNA, 21 bp, synthetic construct
  source 1..21: mol_type = other DNA; mol_type = other DNA
tgtaagaatactaaggttgat

SEQ ID NO: 33650 - DNA, 21 bp, synthetic construct
  source 1..21: mol_type = other DNA; mol_type = other DNA
tgcatgaagcctatgacggca

SEQ ID NO: 33651 - DNA, 21 bp, synthetic construct
  source 1..21: mol_type = other DNA; mol_type = other DNA
tggcagagcaccaacggaatt

SEQ ID NO: 33652 - DNA, 21 bp, synthetic construct
  source 1..21: mol_type = other DNA; mol_type = other DNA
aagtttgattaccaaggtaca

SEQ ID NO: 33653 - DNA, 21 bp, synthetic construct
  source 1..21: mol_type = other DNA; mol_type = other DNA
ggtagcggtaatcaacgatgg

SEQ ID NO: 33654 - DNA, 21 bp, synthetic construct
  source 1..21: mol_type = other DNA; mol_type = other DNA
tggtacagtggcgtaagggag

SEQ ID NO: 33655 - DNA, 21 bp, synthetic construct
  source 1..21: mol_type = other DNA; mol_type = other DNA
atgcatagattgcaggaagac

SEQ ID NO: 33656 - DNA, 21 bp, synthetic construct
  source 1..21: mol_type = other DNA; mol_type = other DNA
tactttaccgcgagagttgag

SEQ ID NO: 33657 - DNA, 21 bp, synthetic construct
  source 1..21: mol_type = other DNA; mol_type = other DNA
accatcgcggacgcgtacccg

SEQ ID NO: 33658 - DNA, 21 bp, synthetic construct
  source 1..21: mol_type = other DNA; mol_type = other DNA
ttcttcgcaggtgtgaaagaa

SEQ ID NO: 33659 - DNA, 21 bp, synthetic construct
  source 1..21: mol_type = other DNA; mol_type = other DNA
tgtacatctaaacagggccat

SEQ ID NO: 33660 - DNA, 21 bp, synthetic construct
  source 1..21: mol_type = other DNA; mol_type = other DNA
ccatgtaaaacgggaggcgag

SEQ ID NO: 33661 - DNA, 21 bp, synthetic construct
  source 1..21: mol_type = other DNA; mol_type = other DNA
tgtccaagggagaacgatggc

SEQ ID NO: 33662 - DNA, 21 bp, synthetic construct
  source 1..21: mol_type = other DNA; mol_type = other DNA
tattcgcgagcgaatcataat

SEQ ID NO: 33663 - DNA, 21 bp, synthetic construct
  source 1..21: mol_type = other DNA; mol_type = other DNA
atgtgggatggcacctacgcc

SEQ ID NO: 33664 - DNA, 21 bp, synthetic construct
  source 1..21: mol_type = other DNA; mol_type = other DNA
gagacagggatgtgtaaaccc

SEQ ID NO: 33665 - DNA, 21 bp, synthetic construct
  source 1..21: mol_type = other DNA; mol_type = other DNA
attgtaagtacgaacggtcga

SEQ ID NO: 33666 - DNA, 21 bp, synthetic construct
  source 1..21: mol_type = other DNA; mol_type = other DNA
atgaaggacggcaccgcgagc

SEQ ID NO: 33667 - DNA, 21 bp, synthetic construct
  source 1..21: mol_type = other DNA; mol_type = other DNA
agcggcgagtcgcggacctgg

SEQ ID NO: 33668 - DNA, 21 bp, synthetic construct
  source 1..21: mol_type = other DNA; mol_type = other DNA
ataggggagcgcggctgggat

SEQ ID NO: 33669 - DNA, 21 bp, synthetic construct
  source 1..21: mol_type = other DNA; mol_type = other DNA
tatactcgtctcgatggtaat

SEQ ID NO: 33670 - DNA, 21 bp, synthetic construct
  source 1..21: mol_type = other DNA; mol_type = other DNA
ttttttaccggcatggtggat

SEQ ID NO: 33671 - DNA, 21 bp, synthetic construct
  source 1..21: mol_type = other DNA; mol_type = other DNA
cgaatgcaagatagaagctgg

SEQ ID NO: 33672 - DNA, 21 bp, synthetic construct
  source 1..21: mol_type = other DNA; mol_type = other DNA
ttaagccgggccgggtacgat

SEQ ID NO: 33673 - DNA, 21 bp, synthetic construct
  source 1..21: mol_type = other DNA; mol_type = other DNA
aacaaagaggggtgcaaaccg

SEQ ID NO: 33674 - DNA, 21 bp, synthetic construct
  source 1..21: mol_type = other DNA; mol_type = other DNA
tttgcaaaaacaggatataac

SEQ ID NO: 33675 - DNA, 21 bp, synthetic construct
  source 1..21: mol_type = other DNA; mol_type = other DNA
cgggatgagttccacgtatgg

SEQ ID NO: 33676 - DNA, 21 bp, synthetic construct
  source 1..21: mol_type = other DNA; mol_type = other DNA
tatacaagactccagaattta

SEQ ID NO: 33677 - DNA, 21 bp, synthetic construct
  source 1..21: mol_type = other DNA; mol_type = other DNA
aaggacgaatggcgtcctttt

SEQ ID NO: 33678 - DNA, 21 bp, synthetic construct
  source 1..21: mol_type = other DNA; mol_type = other DNA
tacttttcgggacaatctgct

SEQ ID NO: 33679 - DNA, 21 bp, synthetic construct
  source 1..21: mol_type = other DNA; mol_type = other DNA
tactggagtgaagtgagagca

SEQ ID NO: 33680 - DNA, 21 bp, synthetic construct
  source 1..21: mol_type = other DNA; mol_type = other DNA
atggtccgtaatcagccaaat

SEQ ID NO: 33681 - DNA, 21 bp, synthetic construct
  source 1..21: mol_type = other DNA; mol_type = other DNA
tgtaaaacgaagcttttagaa

SEQ ID NO: 33682 - DNA, 21 bp, synthetic construct
  source 1..21: mol_type = other DNA; mol_type = other DNA
tacagtagatacaacattaat

SEQ ID NO: 33683 - DNA, 21 bp, synthetic construct
  source 1..21: mol_type = other DNA; mol_type = other DNA
cgcgattcaactaatggcgtt

SEQ ID NO: 33684 - DNA, 21 bp, synthetic construct
  source 1..21: mol_type = other DNA; mol_type = other DNA
gttccgtgtccagtcccgcct

SEQ ID NO: 33685 - DNA, 21 bp, synthetic construct
  source 1..21: mol_type = other DNA; mol_type = other DNA
atttatagtacaaatggagtc

SEQ ID NO: 33686 - DNA, 21 bp, synthetic construct
  source 1..21: mol_type = other DNA; mol_type = other DNA
ggtggcggcgttgtcagatat

SEQ ID NO: 33687 - DNA, 21 bp, synthetic construct
  source 1..21: mol_type = other DNA; mol_type = other DNA
tgcgcgcccgcgtatcgggaa

SEQ ID NO: 33688 - DNA, 21 bp, synthetic construct
  source 1..21: mol_type = other DNA; mol_type = other DNA
taccctccgggttgcaaagag

SEQ ID NO: 33689 - DNA, 21 bp, synthetic construct
  source 1..21: mol_type = other DNA; mol_type = other DNA
tactcgagattgagcgactac

SEQ ID NO: 33690 - DNA, 21 bp, synthetic construct
  source 1..21: mol_type = other DNA; mol_type = other DNA
actaggtggggagataatgcc

SEQ ID NO: 33691 - DNA, 21 bp, synthetic construct
  source 1..21: mol_type = other DNA; mol_type = other DNA
ttttttactggtaaaatggat

SEQ ID NO: 33692 - DNA, 21 bp, synthetic construct
  source 1..21: mol_type = other DNA; mol_type = other DNA
tacagtcgaaatggaacgaac

SEQ ID NO: 33693 - DNA, 21 bp, synthetic construct
  source 1..21: mol_type = other DNA; mol_type = other DNA
tgcaagatgagctgtccgatg

SEQ ID NO: 33694 - DNA, 21 bp, synthetic construct
  source 1..21: mol_type = other DNA; mol_type = other DNA
cggaacgagtttaccgtttat

SEQ ID NO: 33695 - DNA, 21 bp, synthetic construct
  source 1..21: mol_type = other DNA; mol_type = other DNA
gggtcaggacaatcgagttgg

SEQ ID NO: 33696 - DNA, 21 bp, synthetic construct
  source 1..21: mol_type = other DNA; mol_type = other DNA
acccatagattgatcgtagcc

SEQ ID NO: 33697 - DNA, 21 bp, synthetic construct
  source 1..21: mol_type = other DNA; mol_type = other DNA
catcagagttccaacggtgtc

SEQ ID NO: 33698 - DNA, 21 bp, synthetic construct
  source 1..21: mol_type = other DNA; mol_type = other DNA
caaaatcaaacttccaggtgg

SEQ ID NO: 33699 - DNA, 21 bp, synthetic construct
  source 1..21: mol_type = other DNA; mol_type = other DNA
tggcatcgcttaagcgtcaac

SEQ ID NO: 33700 - DNA, 21 bp, synthetic construct
  source 1..21: mol_type = other DNA; mol_type = other DNA
gtcgaggaaggttggagctgg

SEQ ID NO: 33701 - DNA, 21 bp, synthetic construct
  source 1..21: mol_type = other DNA; mol_type = other DNA
ggtgtggagagcgtacgttgg

SEQ ID NO: 33702 - DNA, 21 bp, synthetic construct
  source 1..21: mol_type = other DNA; mol_type = other DNA
tacagtcgacaaaattccaat

SEQ ID NO: 33703 - DNA, 21 bp, synthetic construct
  source 1..21: mol_type = other DNA; mol_type = other DNA
tattggtccggtcaactagat

SEQ ID NO: 33704 - DNA, 21 bp, synthetic construct
  source 1..21: mol_type = other DNA; mol_type = other DNA
tacaccaaatcccaagtggac

SEQ ID NO: 33705 - DNA, 21 bp, synthetic construct
  source 1..21: mol_type = other DNA; mol_type = other DNA
ttcttcaccgggatgagggac

SEQ ID NO: 33706 - DNA, 21 bp, synthetic construct
  source 1..21: mol_type = other DNA; mol_type = other DNA
tgcaataagccggataccgct

SEQ ID NO: 33707 - DNA, 21 bp, synthetic construct
  source 1..21: mol_type = other DNA; mol_type = other DNA
tatgcaaagggcaacatgaat

SEQ ID NO: 33708 - DNA, 21 bp, synthetic construct
  source 1..21: mol_type = other DNA; mol_type = other DNA
caccactcgagcaacggcgta

SEQ ID NO: 33709 - DNA, 21 bp, synthetic construct
  source 1..21: mol_type = other DNA; mol_type = other DNA
tgcaagccgccgagcccaatt

SEQ ID NO: 33710 - DNA, 21 bp, synthetic construct
  source 1..21: mol_type = other DNA; mol_type = other DNA
tactcgaagggtaacgcgaac

SEQ ID NO: 33711 - DNA, 21 bp, synthetic construct
  source 1..21: mol_type = other DNA; mol_type = other DNA
tcagacggaaactcaaaatgg

SEQ ID NO: 33712 - DNA, 21 bp, synthetic construct
  source 1..21: mol_type = other DNA; mol_type = other DNA
tgtaagccccaacatgggggc

SEQ ID NO: 33713 - DNA, 21 bp, synthetic construct
  source 1..21: mol_type = other DNA; mol_type = other DNA
cgcgatggcgaaagcagctgg

SEQ ID NO: 33714 - DNA, 21 bp, synthetic construct
  source 1..21: mol_type = other DNA; mol_type = other DNA
tgcgaagcgcgaccgatcgag

SEQ ID NO: 33715 - DNA, 21 bp, synthetic construct
  source 1..21: mol_type = other DNA; mol_type = other DNA
tggttcagcaaagtcatcgaa

SEQ ID NO: 33716 - DNA, 21 bp, synthetic construct
  source 1..21: mol_type = other DNA; mol_type = other DNA
ttttattcgggtgtcaaagag

SEQ ID NO: 33717 - DNA, 21 bp, synthetic construct
  source 1..21: mol_type = other DNA; mol_type = other DNA
acagatggctactcaaggtac

SEQ ID NO: 33718 - DNA, 21 bp, synthetic construct
  source 1..21: mol_type = other DNA; mol_type = other DNA
ttccggggaaactgcggcccc

SEQ ID NO: 33719 - DNA, 21 bp, synthetic construct
  source 1..21: mol_type = other DNA; mol_type = other DNA
tatagtcgaaacaacataaac

SEQ ID NO: 33720 - DNA, 21 bp, synthetic construct
  source 1..21: mol_type = other DNA; mol_type = other DNA
tgcggtaagattaagtgcgct

SEQ ID NO: 33721 - DNA, 21 bp, synthetic construct
  source 1..21: mol_type = other DNA; mol_type = other DNA
ggatccggaacatccaactgg

SEQ ID NO: 33722 - DNA, 21 bp, synthetic construct
  source 1..21: mol_type = other DNA; mol_type = other DNA
atagcacacaaatgtcccgga

SEQ ID NO: 33723 - DNA, 21 bp, synthetic construct
  source 1..21: mol_type = other DNA; mol_type = other DNA
tattggtcacgggtcagcgaa

SEQ ID NO: 33724 - DNA, 21 bp, synthetic construct
  source 1..21: mol_type = other DNA; mol_type = other DNA
gggtctgagtttacaagttac

SEQ ID NO: 33725 - DNA, 21 bp, synthetic construct
  source 1..21: mol_type = other DNA; mol_type = other DNA
aagaacgatcacgtgcgttgg

SEQ ID NO: 33726 - DNA, 21 bp, synthetic construct
  source 1..21: mol_type = other DNA; mol_type = other DNA
tacgaccgtttgagttgtaat

SEQ ID NO: 33727 - DNA, 21 bp, synthetic construct
  source 1..21: mol_type = other DNA; mol_type = other DNA
acacccgacagtgtccgttgg

SEQ ID NO: 33728 - DNA, 21 bp, synthetic construct
  source 1..21: mol_type = other DNA; mol_type = other DNA
aagagtgaccacgttcgctgg

SEQ ID NO: 33729 - DNA, 21 bp, synthetic construct
  source 1..21: mol_type = other DNA; mol_type = other DNA
aataagttaaaagactgtaac

SEQ ID NO: 33730 - DNA, 21 bp, synthetic construct
  source 1..21: mol_type = other DNA; mol_type = other DNA
tactacaccgggcaggtttta

SEQ ID NO: 33731 - DNA, 21 bp, synthetic construct
  source 1..21: mol_type = other DNA; mol_type = other DNA
cgaggagagagttctagctgg

SEQ ID NO: 33732 - DNA, 21 bp, synthetic construct
  source 1..21: mol_type = other DNA; mol_type = other DNA
tatgctaaaagtggctgcaac

SEQ ID NO: 33733 - DNA, 21 bp, synthetic construct
  source 1..21: mol_type = other DNA; mol_type = other DNA
tgtagcaagcccactcctagc

SEQ ID NO: 33734 - DNA, 21 bp, synthetic construct
  source 1..21: mol_type = other DNA; mol_type = other DNA
tatagtagacagaatctgaac

SEQ ID NO: 33735 - DNA, 21 bp, synthetic construct
  source 1..21: mol_type = other DNA; mol_type = other DNA
tacagtaaaaatgggcataat

SEQ ID NO: 33736 - DNA, 21 bp, synthetic construct
  source 1..21: mol_type = other DNA; mol_type = other DNA
cttatggacggtacatcggcc

SEQ ID NO: 33737 - DNA, 21 bp, synthetic construct
  source 1..21: mol_type = other DNA
ggctccgagttcaagagttgg

SEQ ID NO: 33738 - DNA, 21 bp, synthetic construct
  source 1..21: mol_type = other DNA; mol_type = other DNA
tactctcggcaaaacctaaat

SEQ ID NO: 33739 - DNA, 21 bp, synthetic construct
  source 1..21: mol_type = other DNA; mol_type = other DNA
ttcttcagtggtcaacgggat

SEQ ID NO: 33740 - DNA, 21 bp, synthetic construct
  source 1..21: mol_type = other DNA; mol_type = other DNA
tacgctcggcagaacgttaat

SEQ ID NO: 33741 - DNA, 21 bp, synthetic construct
  source 1..21: mol_type = other DNA; mol_type = other DNA
tactttgctggtgagcgggac

SEQ ID NO: 33742 - DNA, 21 bp, synthetic construct
  source 1..21: mol_type = other DNA; mol_type = other DNA
tactcaagaacgaacttcaac

SEQ ID NO: 33743 - DNA, 21 bp, synthetic construct
  source 1..21: mol_type = other DNA; mol_type = other DNA
tgcaaaccgttagccagggac

SEQ ID NO: 33744 - DNA, 21 bp, synthetic construct
  source 1..21: mol_type = other DNA; mol_type = other DNA
tattttgctgggcaattttca

SEQ ID NO: 33745 - DNA, 21 bp, synthetic construct
  source 1..21: mol_type = other DNA; mol_type = other DNA
ttaaaggacggaacatgcagt

SEQ ID NO: 33746 - DNA, 21 bp, synthetic construct
  source 1..21: mol_type = other DNA; mol_type = other DNA
attgacgagttcctgtcatgg

SEQ ID NO: 33747 - DNA, 21 bp, synthetic construct
  source 1..21: mol_type = other DNA; mol_type = other DNA
gacctaaagtcggccaactgg

SEQ ID NO: 33748 - DNA, 21 bp, synthetic construct
  source 1..21: mol_type = other DNA; mol_type = other DNA
ttctcgaaagtagggcttaac

SEQ ID NO: 33749 - DNA, 21 bp, synthetic construct
  source 1..21: mol_type = other DNA; mol_type = other DNA
atgcgctcgactaatggagtg

SEQ ID NO: 33750 - DNA, 21 bp, synthetic construct
  source 1..21: mol_type = other DNA; mol_type = other DNA
tgtaagacgaagagtcaggag

SEQ ID NO: 33751 - DNA, 21 bp, synthetic construct
  source 1..21: mol_type = other DNA; mol_type = other DNA
tactctcgtactaaccttaat

SEQ ID NO: 33752 - DNA, 21 bp, synthetic construct
  source 1..21: mol_type = other DNA; mol_type = other DNA
tggccgcctatgtgtaaagct

SEQ ID NO: 33753 - DNA, 21 bp, synthetic construct
  source 1..21: mol_type = other DNA; mol_type = other DNA
tgcaaaattcctggtgttcca

SEQ ID NO: 33754 - DNA, 21 bp, synthetic construct
  source 1..21: mol_type = other DNA; mol_type = other DNA
gccggtcacgatagaggatgg

SEQ ID NO: 33755 - DNA, 21 bp, synthetic construct
  source 1..21: mol_type = other DNA; mol_type = other DNA
tgtaagcctgataagcccctt

SEQ ID NO: 33756 - DNA, 21 bp, synthetic construct
  source 1..21: mol_type = other DNA; mol_type = other DNA
cgcaacgacggcgttcgctgg

SEQ ID NO: 33757 - DNA, 21 bp, synthetic construct
  source 1..21: mol_type = other DNA; mol_type = other DNA
tattggtcggggcggacggag

SEQ ID NO: 33758 - DNA, 21 bp, synthetic construct
  source 1..21: mol_type = other DNA; mol_type = other DNA
aggatgtcctcgggggtatgg

SEQ ID NO: 33759 - DNA, 21 bp, synthetic construct
  source 1..21: mol_type = other DNA; mol_type = other DNA
tatcaccgacaaaatcccctt

SEQ ID NO: 33760 - DNA, 21 bp, synthetic construct
  source 1..21: mol_type = other DNA; mol_type = other DNA
tgtaagccacaaacgccaacg

SEQ ID NO: 33761 - DNA, 21 bp, synthetic construct
  source 1..21: mol_type = other DNA; mol_type = other DNA
ttcttttctggggaacgggag

SEQ ID NO: 33762 - DNA, 21 bp, synthetic construct
  source 1..21: mol_type = other DNA; mol_type = other DNA
cagcaaagtactaacggacgc

SEQ ID NO: 33763 - DNA, 21 bp, synthetic construct
  source 1..21: mol_type = other DNA; mol_type = other DNA
catgactcaaccaacggcata

SEQ ID NO: 33764 - DNA, 21 bp, synthetic construct
  source 1..21: mol_type = other DNA; mol_type = other DNA
gatatgagttcaatgtcctgg

SEQ ID NO: 33765 - DNA, 21 bp, synthetic construct
  source 1..21: mol_type = other DNA; mol_type = other DNA
agggatagttacagcacgtat

SEQ ID NO: 33766 - DNA, 21 bp, synthetic construct
  source 1..21: mol_type = other DNA; mol_type = other DNA
gggggcggaacgtcgaaatgg

SEQ ID NO: 33767 - DNA, 21 bp, synthetic construct
  source 1..21: mol_type = other DNA; mol_type = other DNA
tacgcccgtggatctaataac

SEQ ID NO: 33768 - DNA, 21 bp, synthetic construct
  source 1..21: mol_type = other DNA; mol_type = other DNA
tgcacctccaagacaggttca

SEQ ID NO: 33769 - DNA, 21 bp, synthetic construct
  source 1..21: mol_type = other DNA; mol_type = other DNA
tggtttacgggaattcgcgac

SEQ ID NO: 33770 - DNA, 21 bp, synthetic construct
  source 1..21: mol_type = other DNA; mol_type = other DNA
tattggactggtaagcctgaa

SEQ ID NO: 33771 - DNA, 21 bp, synthetic construct
  source 1..21: mol_type = other DNA; mol_type = other DNA
tacgccaaaggcaatacaaac

SEQ ID NO: 33772 - DNA, 21 bp, synthetic construct
  source 1..21: mol_type = other DNA; mol_type = other DNA
tacttcagcaatgtaaaatcg

SEQ ID NO: 33773 - DNA, 21 bp, synthetic construct
  source 1..21: mol_type = other DNA; mol_type = other DNA
tacgcgcggagcaaccacaac

SEQ ID NO: 33774 - DNA, 21 bp, synthetic construct
  source 1..21: mol_type = other DNA; mol_type = other DNA
tattggaccgggcgtcccgat

SEQ ID NO: 33775 - DNA, 21 bp, synthetic construct
  source 1..21: mol_type = other DNA; mol_type = other DNA
gatatgcgaagtacgaagtgg

SEQ ID NO: 33776 - DNA, 21 bp, synthetic construct
  source 1..21: mol_type = other DNA; mol_type = other DNA
acaaaagagggaatgtgcatt

SEQ ID NO: 33777 - DNA, 21 bp, synthetic construct
  source 1..21: mol_type = other DNA; mol_type = other DNA
tgtagcaaaaagccatgtgga

SEQ ID NO: 33778 - DNA, 21 bp, synthetic construct
  source 1..21: mol_type = other DNA; mol_type = other DNA
actagaaacgaaagtttttgt

SEQ ID NO: 33779 - DNA, 21 bp, synthetic construct
  source 1..21: mol_type = other DNA; mol_type = other DNA
gacaacagagggatgatcgct

SEQ ID NO: 33780 - DNA, 21 bp, synthetic construct
  source 1..21: mol_type = other DNA; mol_type = other DNA
tatagtcgtcgaaacgaaaat

SEQ ID NO: 33781 - DNA, 21 bp, synthetic construct
  source 1..21: mol_type = other DNA; mol_type = other DNA
tggttcagtggacaaagagat

SEQ ID NO: 33782 - DNA, 21 bp, synthetic construct
  source 1..21: mol_type = other DNA; mol_type = other DNA
aggttgcccgacgtataccct

SEQ ID NO: 33783 - DNA, 21 bp, synthetic construct
  source 1..21: mol_type = other DNA; mol_type = other DNA
tgtcagaggaagtgtgttcct

SEQ ID NO: 33784 - DNA, 21 bp, synthetic construct
  source 1..21: mol_type = other DNA; mol_type = other DNA
tgtaataacccaatgactgcg

SEQ ID NO: 33785 - DNA, 21 bp, synthetic construct
  source 1..21: mol_type = other DNA; mol_type = other DNA
aatggcactaatggcagatgg

SEQ ID NO: 33786 - DNA, 21 bp, synthetic construct
  source 1..21: mol_type = other DNA; mol_type = other DNA
tgcgggaaaagcgggccatcg

SEQ ID NO: 33787 - DNA, 21 bp, synthetic construct
  source 1..21: mol_type = other DNA; mol_type = other DNA
tactggagctcagtcaaagat

SEQ ID NO: 33788 - DNA, 21 bp, synthetic construct
  source 1..21: mol_type = other DNA; mol_type = other DNA
gtctgtcgaccatgtagtgag

SEQ ID NO: 33789 - DNA, 21 bp, synthetic construct
  source 1..21: mol_type = other DNA; mol_type = other DNA
ggctgtagagtaggcgacatc

SEQ ID NO: 33790 - DNA, 21 bp, synthetic construct
  source 1..21: mol_type = other DNA; mol_type = other DNA
ttttggacaggtatgagggaa

SEQ ID NO: 33791 - DNA, 21 bp, synthetic construct
  source 1..21: mol_type = other DNA; mol_type = other DNA
tacgtgaaaagtcagccggta

SEQ ID NO: 33792 - DNA, 21 bp, synthetic construct
  source 1..21: mol_type = other DNA; mol_type = other DNA
ttctggagtgggaccgtagag

SEQ ID NO: 33793 - DNA, 21 bp, synthetic construct
  source 1..21: mol_type = other DNA; mol_type = other DNA
tactacactgggaagctctca

SEQ ID NO: 33794 - DNA, 21 bp, synthetic construct
  source 1..21: mol_type = other DNA; mol_type = other DNA
tattgggagggggtcagggag

SEQ ID NO: 33795 - DNA, 21 bp, synthetic construct
  source 1..21: mol_type = other DNA; mol_type = other DNA
tatgctaaaaccaattataac

SEQ ID NO: 33796 - DNA, 21 bp, synthetic construct
  source 1..21: mol_type = other DNA; mol_type = other DNA
tatcatcgtatcggcgtgaac

SEQ ID NO: 33797 - DNA, 21 bp, synthetic construct
  source 1..21: mol_type = other DNA; mol_type = other DNA
tgtgctccggataaacgggag

SEQ ID NO: 33798 - DNA, 21 bp, synthetic construct
  source 1..21: mol_type = other DNA; mol_type = other DNA
tacgcaagggccaactataac

SEQ ID NO: 33799 - DNA, 21 bp, synthetic construct
  source 1..21: mol_type = other DNA; mol_type = other DNA
tgcaaaccgggggagggggcc

SEQ ID NO: 33800 - DNA, 21 bp, synthetic construct
  source 1..21: mol_type = other DNA; mol_type = other DNA
tattattcaggagtgaaagtt

SEQ ID NO: 33801 - DNA, 21 bp, synthetic construct
  source 1..21: mol_type = other DNA; mol_type = other DNA
tgtaaagcaaatgctcccgat

SEQ ID NO: 33802 - DNA, 21 bp, synthetic construct
  source 1..21: mol_type = other DNA; mol_type = other DNA
tattcacgtgtaaatcaaaac

SEQ ID NO: 33803 - DNA, 21 bp, synthetic construct
  source 1..21: mol_type = other DNA; mol_type = other DNA
tatgctagaataggcgaaaac

SEQ ID NO: 33804 - DNA, 21 bp, synthetic construct
  source 1..21: mol_type = other DNA; mol_type = other DNA
tgcaaacgaggcttacctgag

SEQ ID NO: 33805 - DNA, 21 bp, synthetic construct
  source 1..21: mol_type = other DNA; mol_type = other DNA
tttgccagggcgtgtcagaat

SEQ ID NO: 33806 - DNA, 21 bp, synthetic construct
  source 1..21: mol_type = other DNA; mol_type = other DNA
tactatactggagtaatgagc

SEQ ID NO: 33807 - DNA, 21 bp, synthetic construct
  source 1..21: mol_type = other DNA; mol_type = other DNA
ttctttacaggtatacaggcg

SEQ ID NO: 33808 - DNA, 21 bp, synthetic construct
  source 1..21: mol_type = other DNA; mol_type = other DNA
acattttatggtgcgaatgcc

SEQ ID NO: 33809 - DNA, 21 bp, synthetic construct
  source 1..21: mol_type = other DNA; mol_type = other DNA
tttacgcgattaagcataaac

SEQ ID NO: 33810 - DNA, 21 bp, synthetic construct
  source 1..21: mol_type = other DNA; mol_type = other DNA
gggtgtggcaccaagtgtcaa

SEQ ID NO: 33811 - DNA, 21 bp, synthetic construct
  source 1..21: mol_type = other DNA; mol_type = other DNA
tgcaatggtaccggccccagc

SEQ ID NO: 33812 - DNA, 21 bp, synthetic construct
  source 1..21: mol_type = other DNA; mol_type = other DNA
ggaggaggcactagtgcgtgg

SEQ ID NO: 33813 - DNA, 21 bp, synthetic construct
  source 1..21: mol_type = other DNA; mol_type = other DNA
tcgaagagtacgaacggaata

SEQ ID NO: 33814 - DNA, 21 bp, synthetic construct
  source 1..21: mol_type = other DNA; mol_type = other DNA
atgatgcaagatcggtcgtgg

SEQ ID NO: 33815 - DNA, 21 bp, synthetic construct
  source 1..21: mol_type = other DNA; mol_type = other DNA
tattttacagcccgaatcgat

SEQ ID NO: 33816 - DNA, 21 bp, synthetic construct
  source 1..21: mol_type = other DNA; mol_type = other DNA
tgtcgacccggcgcaattgcc

SEQ ID NO: 33817 - DNA, 21 bp, synthetic construct
  source 1..21: mol_type = other DNA; mol_type = other DNA
caaaaagctggccaagaatgc

SEQ ID NO: 33818 - DNA, 21 bp, synthetic construct
  source 1..21: mol_type = other DNA; mol_type = other DNA
tataaaggaggcgaaccttgc

SEQ ID NO: 33819 - DNA, 21 bp, synthetic construct
  source 1..21: mol_type = other DNA; mol_type = other DNA
tgtaagaagtttaaagaggat

SEQ ID NO: 33820 - DNA, 21 bp, synthetic construct
  source 1..21: mol_type = other DNA; mol_type = other DNA
ggcggccacacttcgacctgg

SEQ ID NO: 33821 - DNA, 21 bp, synthetic construct
  source 1..21: mol_type = other DNA; mol_type = other DNA
gaggagagcacgaatggaaga

SEQ ID NO: 33822 - DNA, 21 bp, synthetic construct
  source 1..21: mol_type = other DNA; mol_type = other DNA
tactggcatgggaaacctgac

SEQ ID NO: 33823 - DNA, 21 bp, synthetic construct
  source 1..21: mol_type = other DNA; mol_type = other DNA
cttggggacgtcatgaagtgc

SEQ ID NO: 33824 - DNA, 21 bp, synthetic construct
  source 1..21: mol_type = other DNA; mol_type = other DNA
ggcatcggaacaaaatgcggc

SEQ ID NO: 33825 - DNA, 21 bp, synthetic construct
  source 1..21: mol_type = other DNA; mol_type = other DNA
aaaaatgactacattacttac

SEQ ID NO: 33826 - DNA, 21 bp, synthetic construct
  source 1..21: mol_type = other DNA; mol_type = other DNA
tgtaagggtgacagtaagtta

SEQ ID NO: 33827 - DNA, 21 bp, synthetic construct
  source 1..21: mol_type = other DNA; mol_type = other DNA
gtctcgactcacaattgcgca

SEQ ID NO: 33828 - DNA, 21 bp, synthetic construct
  source 1..21: mol_type = other DNA; mol_type = other DNA
gctttaagtgatagaagttgg

SEQ ID NO: 33829 - DNA, 21 bp, synthetic construct
  source 1..21: mol_type = other DNA; mol_type = other DNA
atcgcacatgaaggtgcgggt

SEQ ID NO: 33830 - DNA, 21 bp, synthetic construct
  source 1..21: mol_type = other DNA; mol_type = other DNA
ttctttagtacgaatggtatc

SEQ ID NO: 33831 - DNA, 21 bp, synthetic construct
  source 1..21: mol_type = other DNA; mol_type = other DNA
aataagggagaaggcgggtgt

SEQ ID NO: 33832 - DNA, 21 bp, synthetic construct
  source 1..21: mol_type = other DNA; mol_type = other DNA
ttagagtcttcaaacggcgta

SEQ ID NO: 33833 - DNA, 21 bp, synthetic construct
  source 1..21: mol_type = other DNA; mol_type = other DNA
ctgcacaaaaaaatgccggat

SEQ ID NO: 33834 - DNA, 21 bp, synthetic construct
  source 1..21: mol_type = other DNA; mol_type = other DNA
tatagtcggatgaacgccaac

SEQ ID NO: 33835 - DNA, 21 bp, synthetic construct
  source 1..21: mol_type = other DNA; mol_type = other DNA
cgcagagacgggactccagct

SEQ ID NO: 33836 - DNA, 21 bp, synthetic construct
  source 1..21: mol_type = other DNA; mol_type = other DNA
tatttcagtggtattactacc

SEQ ID NO: 33837 - DNA, 21 bp, synthetic construct
  source 1..21: mol_type = other DNA; mol_type = other DNA
cgcgaacctactgtccgctgg

SEQ ID NO: 33838 - DNA, 21 bp, synthetic construct
  source 1..21: mol_type = other DNA; mol_type = other DNA
ataccacacaggtcgtgtgca

SEQ ID NO: 33839 - DNA, 21 bp, synthetic construct
  source 1..21: mol_type = other DNA; mol_type = other DNA
tatgcacgaggaaacgataat

SEQ ID NO: 33840 - DNA, 21 bp, synthetic construct
  source 1..21: mol_type = other DNA; mol_type = other DNA
tacttcaccggggccatggat

SEQ ID NO: 33841 - DNA, 21 bp, synthetic construct
  source 1..21: mol_type = other DNA; mol_type = other DNA
gacctcagttcgacccaatgg

SEQ ID NO: 33842 - DNA, 21 bp, synthetic construct
  source 1..21: mol_type = other DNA; mol_type = other DNA
tgtaagccaaaatgcacccca

SEQ ID NO: 33843 - DNA, 21 bp, synthetic construct
  source 1..21: mol_type = other DNA; mol_type = other DNA
tggacacccatgtgcaatgcc

SEQ ID NO: 33844 - DNA, 21 bp, synthetic construct
  source 1..21: mol_type = other DNA; mol_type = other DNA
tggtattcaggagtccgtgaa

SEQ ID NO: 33845 - DNA, 21 bp, synthetic construct
  source 1..21: mol_type = other DNA; mol_type = other DNA
tattgggctgggagagtagaa

SEQ ID NO: 33846 - DNA, 21 bp, synthetic construct
  source 1..21: mol_type = other DNA; mol_type = other DNA
tatgccaagggtgggcttaac

SEQ ID NO: 33847 - DNA, 21 bp, synthetic construct
  source 1..21: mol_type = other DNA; mol_type = other DNA
agtaggcccacctgtcctgca

SEQ ID NO: 33848 - DNA, 21 bp, synthetic construct
  source 1..21: mol_type = other DNA; mol_type = other DNA
tatgtcaggtacgactcaggt

SEQ ID NO: 33849 - DNA, 21 bp, synthetic construct
  source 1..21: mol_type = other DNA; mol_type = other DNA
tctcagtgtacatcatcaccg

SEQ ID NO: 33850 - DNA, 21 bp, synthetic construct
  source 1..21: mol_type = other DNA; mol_type = other DNA
tggacatcgacacacggagtt

SEQ ID NO: 33851 - DNA, 21 bp, synthetic construct
  source 1..21: mol_type = other DNA; mol_type = other DNA
ccgtgcggtgggaaaccaatc

SEQ ID NO: 33852 - DNA, 21 bp, synthetic construct
  source 1..21: mol_type = other DNA; mol_type = other DNA
tacatgaaatatgacacccag

SEQ ID NO: 33853 - DNA, 21 bp, synthetic construct
  source 1..21: mol_type = other DNA; mol_type = other DNA
ggggaagaaggcgtaagatgg

SEQ ID NO: 33854 - DNA, 21 bp, synthetic construct
  source 1..21: mol_type = other DNA; mol_type = other DNA
ttttggggtggagtaaaggag

SEQ ID NO: 33855 - DNA, 21 bp, synthetic construct
  source 1..21: mol_type = other DNA; mol_type = other DNA
attgtttcgactaacggtatt

SEQ ID NO: 33856 - DNA, 21 bp, synthetic construct
  source 1..21: mol_type = other DNA; mol_type = other DNA
tgggcgcgcggccacgattgt

SEQ ID NO: 33857 - DNA, 21 bp, synthetic construct
  source 1..21: mol_type = other DNA
ctacaccggcttagtgattgg

SEQ ID NO: 33858 - DNA, 21 bp, synthetic construct
  source 1..21: mol_type = other DNA; mol_type = other DNA
cgcgaatatgaggtctttccg

SEQ ID NO: 33859 - DNA, 21 bp, synthetic construct
  source 1..21: mol_type = other DNA; mol_type = other DNA
aaagacgagtatatgtatttc

SEQ ID NO: 33860 - DNA, 21 bp, synthetic construct
  source 1..21: mol_type = other DNA; mol_type = other DNA
tatagtagagggaacatgaat

SEQ ID NO: 33861 - DNA, 21 bp, synthetic construct
  source 1..21: mol_type = other DNA; mol_type = other DNA
tgtaaaggggacgcaaaagct

SEQ ID NO: 33862 - DNA, 21 bp, synthetic construct
  source 1..21: mol_type = other DNA; mol_type = other DNA
tatgcgcgccaaaactataat

SEQ ID NO: 33863 - DNA, 21 bp, synthetic construct
  source 1..21: mol_type = other DNA; mol_type = other DNA
atctccgagttttccgggtat

SEQ ID NO: 33864 - DNA, 21 bp, synthetic construct
  source 1..21: mol_type = other DNA; mol_type = other DNA
ggcggtagcacgagcacatgg

SEQ ID NO: 33865 - DNA, 21 bp, synthetic construct
  source 1..21: mol_type = other DNA; mol_type = other DNA
gtcgcagagaggggttgcggg

SEQ ID NO: 33866 - DNA, 21 bp, synthetic construct
  source 1..21: mol_type = other DNA; mol_type = other DNA
ttcgcgaggtctgggaataat

SEQ ID NO: 33867 - DNA, 21 bp, synthetic construct
  source 1..21: mol_type = other DNA; mol_type = other DNA
gttgtaggggtatgcccggcc

SEQ ID NO: 33868 - DNA, 21 bp, synthetic construct
  source 1..21: mol_type = other DNA; mol_type = other DNA
tacacaaggttggacggcaac

SEQ ID NO: 33869 - DNA, 21 bp, synthetic construct
  source 1..21: mol_type = other DNA; mol_type = other DNA
gggggggaatcttgcaaaagc

SEQ ID NO: 33870 - DNA, 21 bp, synthetic construct
  source 1..21: mol_type = other DNA; mol_type = other DNA
tgtaagccccacaaattggac

SEQ ID NO: 33871 - DNA, 21 bp, synthetic construct
  source 1..21: mol_type = other DNA; mol_type = other DNA
tattcccgcgctaatctcaac

SEQ ID NO: 33872 - DNA, 21 bp, synthetic construct
  source 1..21: mol_type = other DNA; mol_type = other DNA
tactgggcaggtgtaatcgac

SEQ ID NO: 33873 - DNA, 21 bp, synthetic construct
  source 1..21: mol_type = other DNA; mol_type = other DNA
tgcaatccgtcaagtgagaag

SEQ ID NO: 33874 - DNA, 21 bp, synthetic construct
  source 1..21: mol_type = other DNA; mol_type = other DNA
tacagccggatcgacaacaac

SEQ ID NO: 33875 - DNA, 21 bp, synthetic construct
  source 1..21: mol_type = other DNA; mol_type = other DNA
tactggagtcacgtaaaagat

SEQ ID NO: 33876 - DNA, 21 bp, synthetic construct
  source 1..21: mol_type = other DNA; mol_type = other DNA
ggtgcaccaacgtgctgtgct

SEQ ID NO: 33877 - DNA, 21 bp, synthetic construct
  source 1..21: mol_type = other DNA; mol_type = other DNA
tgcaatggacctatgacagca

SEQ ID NO: 33878 - DNA, 21 bp, synthetic construct
  source 1..21: mol_type = other DNA; mol_type = other DNA
tacagtcggcacggcgtcaat

SEQ ID NO: 33879 - DNA, 21 bp, synthetic construct
  source 1..21: mol_type = other DNA; mol_type = other DNA
gagggaccgataggccagtgt

SEQ ID NO: 33880 - DNA, 21 bp, synthetic construct
  source 1..21: mol_type = other DNA; mol_type = other DNA
tattacacagggcgcgcggac

SEQ ID NO: 33881 - DNA, 21 bp, synthetic construct
  source 1..21: mol_type = other DNA; mol_type = other DNA
ttcttcacaggcacagttgag

SEQ ID NO: 33882 - DNA, 21 bp, synthetic construct
  source 1..21: mol_type = other DNA; mol_type = other DNA
atctcgggtggaacagccgga

SEQ ID NO: 33883 - DNA, 21 bp, synthetic construct
  source 1..21: mol_type = other DNA; mol_type = other DNA
agcatgcaagacagaaactgg

SEQ ID NO: 33884 - DNA, 21 bp, synthetic construct
  source 1..21: mol_type = other DNA; mol_type = other DNA
ttttggtcgggtatgaaggac

SEQ ID NO: 33885 - DNA, 21 bp, synthetic construct
  source 1..21: mol_type = other DNA; mol_type = other DNA
atcgaaagttataacgggcgt

SEQ ID NO: 33886 - DNA, 21 bp, synthetic construct
  source 1..21: mol_type = other DNA; mol_type = other DNA
ggcagcgatacgtctcggtgg

SEQ ID NO: 33887 - DNA, 21 bp, synthetic construct
  source 1..21: mol_type = other DNA; mol_type = other DNA
tactattcgggccaacgcgac

SEQ ID NO: 33888 - DNA, 21 bp, synthetic construct
  source 1..21: mol_type = other DNA; mol_type = other DNA
aggtcgccagatgtttttcct

SEQ ID NO: 33889 - DNA, 21 bp, synthetic construct
  source 1..21: mol_type = other DNA; mol_type = other DNA
ggagccgaaggggtccggtgg

SEQ ID NO: 33890 - DNA, 21 bp, synthetic construct
  source 1..21: mol_type = other DNA; mol_type = other DNA
gaaatgcaggacaggagctgg

SEQ ID NO: 33891 - DNA, 21 bp, synthetic construct
  source 1..21: mol_type = other DNA; mol_type = other DNA
actaactgtgctataaatgca

SEQ ID NO: 33892 - DNA, 21 bp, synthetic construct
  source 1..21: mol_type = other DNA; mol_type = other DNA
ctagctaagcaaggttttaat

SEQ ID NO: 33893 - DNA, 21 bp, synthetic construct
  source 1..21: mol_type = other DNA; mol_type = other DNA
cggggcgacgaagtatttcct

SEQ ID NO: 33894 - DNA, 21 bp, synthetic construct
  source 1..21: mol_type = other DNA; mol_type = other DNA
tacttctccggtacgattcgt

SEQ ID NO: 33895 - DNA, 21 bp, synthetic construct
  source 1..21: mol_type = other DNA; mol_type = other DNA
tgcaaacccggaatgggagaa

SEQ ID NO: 33896 - DNA, 21 bp, synthetic construct
  source 1..21: mol_type = other DNA; mol_type = other DNA
agaggcgggaatgtatatcct

SEQ ID NO: 33897 - DNA, 21 bp, synthetic construct
  source 1..21: mol_type = other DNA; mol_type = other DNA
gtgggacagcgttgcgctgag

SEQ ID NO: 33898 - DNA, 21 bp, synthetic construct
  source 1..21: mol_type = other DNA; mol_type = other DNA
gggtcaataggagtctcttgg

SEQ ID NO: 33899 - DNA, 21 bp, synthetic construct
  source 1..21: mol_type = other DNA; mol_type = other DNA
tacagccgccaagggcataac

SEQ ID NO: 33900 - DNA, 21 bp, synthetic construct
  source 1..21: mol_type = other DNA; mol_type = other DNA
tgcaaaggcccctattcagaa

SEQ ID NO: 33901 - DNA, 21 bp, synthetic construct
  source 1..21: mol_type = other DNA; mol_type = other DNA
tgtaggcctgatgtgaaaggt

SEQ ID NO: 33902 - DNA, 21 bp, synthetic construct
  source 1..21: mol_type = other DNA; mol_type = other DNA
tattttagccagatcgtagcg

SEQ ID NO: 33903 - DNA, 21 bp, synthetic construct
  source 1..21: mol_type = other DNA; mol_type = other DNA
ttcttctccggggttcaagaa

SEQ ID NO: 33904 - DNA, 21 bp, synthetic construct
  source 1..21: mol_type = other DNA; mol_type = other DNA
tactacagcggacaaagggcg

SEQ ID NO: 33905 - DNA, 21 bp, synthetic construct
  source 1..21: mol_type = other DNA; mol_type = other DNA
gggtcggagacatcaaaatgg

SEQ ID NO: 33906 - DNA, 21 bp, synthetic construct
  source 1..21: mol_type = other DNA; mol_type = other DNA
tgcaaacggggtgacgctgcg

SEQ ID NO: 33907 - DNA, 21 bp, synthetic construct
  source 1..21: mol_type = other DNA; mol_type = other DNA
tggcaaagtaccaacggcatg

SEQ ID NO: 33908 - DNA, 21 bp, synthetic construct
  source 1..21: mol_type = other DNA; mol_type = other DNA
acgtggtctggagttgttgcc

SEQ ID NO: 33909 - DNA, 21 bp, synthetic construct
  source 1..21: mol_type = other DNA; mol_type = other DNA
ttcgccagaaacgggttcaat

SEQ ID NO: 33910 - DNA, 21 bp, synthetic construct
  source 1..21: mol_type = other DNA; mol_type = other DNA
tgcgcgccgtacttgctggaa

SEQ ID NO: 33911 - DNA, 21 bp, synthetic construct
  source 1..21: mol_type = other DNA; mol_type = other DNA
gggggtcatacaagcacgtgg

SEQ ID NO: 33912 - DNA, 21 bp, synthetic construct
  source 1..21: mol_type = other DNA; mol_type = other DNA
tacgcgcgtttgaacgtaaat

SEQ ID NO: 33913 - DNA, 21 bp, synthetic construct
  source 1..21: mol_type = other DNA; mol_type = other DNA
tatgcaaaaggcaatctaaac

SEQ ID NO: 33914 - DNA, 21 bp, synthetic construct
  source 1..21: mol_type = other DNA; mol_type = other DNA
cggggggagttcatgtcatat

SEQ ID NO: 33915 - DNA, 21 bp, synthetic construct
  source 1..21: mol_type = other DNA; mol_type = other DNA
tttttcgcgggaatcagagag

SEQ ID NO: 33916 - DNA, 21 bp, synthetic construct
  source 1..21: mol_type = other DNA; mol_type = other DNA
tatgcacggtcaaacgataac

SEQ ID NO: 33917 - DNA, 21 bp, synthetic construct
  source 1..21: mol_type = other DNA; mol_type = other DNA
tatgctagtacaaacggggtt

SEQ ID NO: 33918 - DNA, 21 bp, synthetic construct
  source 1..21: mol_type = other DNA; mol_type = other DNA
tactcgagggtaaattttaat

SEQ ID NO: 33919 - DNA, 21 bp, synthetic construct
  source 1..21: mol_type = other DNA; mol_type = other DNA
agtgatggaagcagtctttgg

SEQ ID NO: 33920 - DNA, 21 bp, synthetic construct
  source 1..21: mol_type = other DNA; mol_type = other DNA
agaggtgagcgttgtccagac

SEQ ID NO: 33921 - DNA, 21 bp, synthetic construct
  source 1..21: mol_type = other DNA; mol_type = other DNA
tacttctcggggcaacaacgc

SEQ ID NO: 33922 - DNA, 21 bp, synthetic construct
  source 1..21: mol_type = other DNA; mol_type = other DNA
tggtattctggtgttaaagaa

SEQ ID NO: 33923 - DNA, 21 bp, synthetic construct
  source 1..21: mol_type = other DNA; mol_type = other DNA
ttctgtaggccgtgtagtgag

SEQ ID NO: 33924 - DNA, 21 bp, synthetic construct
  source 1..21: mol_type = other DNA; mol_type = other DNA
tatttttcgggtgtttctgac

SEQ ID NO: 33925 - DNA, 21 bp, synthetic construct
  source 1..21: mol_type = other DNA; mol_type = other DNA
tacgctaggggtgataacggg

SEQ ID NO: 33926 - DNA, 21 bp, synthetic construct
  source 1..21: mol_type = other DNA; mol_type = other DNA
aggatggactccgtcgtatgg

SEQ ID NO: 33927 - DNA, 21 bp, synthetic construct
  source 1..21: mol_type = other DNA; mol_type = other DNA
tgcaggccgggtgctatcgct

SEQ ID NO: 33928 - DNA, 21 bp, synthetic construct
  source 1..21: mol_type = other DNA; mol_type = other DNA
tatactcgaagtcaaactgag

SEQ ID NO: 33929 - DNA, 21 bp, synthetic construct
  source 1..21: mol_type = other DNA; mol_type = other DNA
tactttacggggaaggaagaa

SEQ ID NO: 33930 - DNA, 21 bp, synthetic construct
  source 1..21: mol_type = other DNA; mol_type = other DNA
tgtcgtccgagcccgggtata

SEQ ID NO: 33931 - DNA, 21 bp, synthetic construct
  source 1..21: mol_type = other DNA; mol_type = other DNA
ttcttctcaggtaggctggaa

SEQ ID NO: 33932 - DNA, 21 bp, synthetic construct
  source 1..21: mol_type = other DNA; mol_type = other DNA
tacagcaaatacaactacaat

SEQ ID NO: 33933 - DNA, 21 bp, synthetic construct
  source 1..21: mol_type = other DNA; mol_type = other DNA
tggagtccgatgtgcaaggcc

SEQ ID NO: 33934 - DNA, 21 bp, synthetic construct
  source 1..21: mol_type = other DNA; mol_type = other DNA
ggcccaatgagctgtaaggaa

SEQ ID NO: 33935 - DNA, 21 bp, synthetic construct
  source 1..21: mol_type = other DNA; mol_type = other DNA
tggtggacaggcatgcccgac

SEQ ID NO: 33936 - DNA, 21 bp, synthetic construct
  source 1..21: mol_type = other DNA; mol_type = other DNA
ttggcccgctcgggtgataat

SEQ ID NO: 33937 - DNA, 21 bp, synthetic construct
  source 1..21: mol_type = other DNA; mol_type = other DNA
gtaagtagtacgtgtacggca

SEQ ID NO: 33938 - DNA, 21 bp, synthetic construct
  source 1..21: mol_type = other DNA; mol_type = other DNA
tactgggagggtgtgaaggat

SEQ ID NO: 33939 - DNA, 21 bp, synthetic construct
  source 1..21: mol_type = other DNA; mol_type = other DNA
gtagacgactggtcaatgtat

SEQ ID NO: 33940 - DNA, 21 bp, synthetic construct
  source 1..21: mol_type = other DNA; mol_type = other DNA
tgggataatggagtcacgggg

SEQ ID NO: 33941 - DNA, 21 bp, synthetic construct
  source 1..21: mol_type = other DNA; mol_type = other DNA
aatacccccatgtgtaaagca

SEQ ID NO: 33942 - DNA, 21 bp, synthetic construct
  source 1..21: mol_type = other DNA; mol_type = other DNA
gttagttcgcaaaatggagta

SEQ ID NO: 33943 - DNA, 21 bp, synthetic construct
  source 1..21: mol_type = other DNA; mol_type = other DNA
aaagacgacttcgtagttttt

SEQ ID NO: 33944 - DNA, 21 bp, synthetic construct
  source 1..21: mol_type = other DNA; mol_type = other DNA
tactcgaagttagacccgtta

SEQ ID NO: 33945 - DNA, 21 bp, synthetic construct
  source 1..21: mol_type = other DNA; mol_type = other DNA
gtaagcggaggaacagcgggc

SEQ ID NO: 33946 - DNA, 21 bp, synthetic construct
  source 1..21: mol_type = other DNA; mol_type = other DNA
agaagtgataccgtgtactgg

SEQ ID NO: 33947 - DNA, 21 bp, synthetic construct
  source 1..21: mol_type = other DNA; mol_type = other DNA
tacagcagaatgaaccaaaac

SEQ ID NO: 33948 - DNA, 21 bp, synthetic construct
  source 1..21: mol_type = other DNA; mol_type = other DNA
tattttgtaggccgcacggac

SEQ ID NO: 33949 - DNA, 21 bp, synthetic construct
  source 1..21: mol_type = other DNA; mol_type = other DNA
ggatcggaattctcgacgtac

SEQ ID NO: 33950 - DNA, 21 bp, synthetic construct
  source 1..21: mol_type = other DNA; mol_type = other DNA
tactcgcggcaaaacttcaat

SEQ ID NO: 33951 - DNA, 21 bp, synthetic construct
  source 1..21: mol_type = other DNA; mol_type = other DNA
tattcgagcactaacggcata

SEQ ID NO: 33952 - DNA, 21 bp, synthetic construct
  source 1..21: mol_type = other DNA; mol_type = other DNA
tgcaaaaaggatgaagcggtc

SEQ ID NO: 33953 - DNA, 21 bp, synthetic construct
  source 1..21: mol_type = other DNA; mol_type = other DNA
agggatagtgacaatgggatt

SEQ ID NO: 33954 - DNA, 21 bp, synthetic construct
  source 1..21: mol_type = other DNA; mol_type = other DNA
tactctcggagcgggcacaac

SEQ ID NO: 33955 - DNA, 21 bp, synthetic construct
  source 1..21: mol_type = other DNA; mol_type = other DNA
tactcacggggaaatatgaat

SEQ ID NO: 33956 - DNA, 21 bp, synthetic construct
  source 1..21: mol_type = other DNA; mol_type = other DNA
atcgatgaatttttaagttgg

SEQ ID NO: 33957 - DNA, 21 bp, synthetic construct
  source 1..21: mol_type = other DNA; mol_type = other DNA
tactggtccggaaggccggag

SEQ ID NO: 33958 - DNA, 21 bp, synthetic construct
  source 1..21: mol_type = other DNA; mol_type = other DNA
tatagtcgcaataaccctaac

SEQ ID NO: 33959 - DNA, 21 bp, synthetic construct
  source 1..21: mol_type = other DNA; mol_type = other DNA
tgtaacaagccgtacactgcc

SEQ ID NO: 33960 - DNA, 21 bp, synthetic construct
  source 1..21: mol_type = other DNA; mol_type = other DNA
tatgcgaggggcaatgacaac

SEQ ID NO: 33961 - DNA, 21 bp, synthetic construct
  source 1..21: mol_type = other DNA; mol_type = other DNA
tgtaaggcagggtgcaaagat

SEQ ID NO: 33962 - DNA, 21 bp, synthetic construct
  source 1..21: mol_type = other DNA; mol_type = other DNA
gtcgactctgataacggcagg

SEQ ID NO: 33963 - DNA, 21 bp, synthetic construct
  source 1..21: mol_type = other DNA; mol_type = other DNA
tgcacctcgcaaacagggcat

SEQ ID NO: 33964 - DNA, 21 bp, synthetic construct
  source 1..21: mol_type = other DNA; mol_type = other DNA
tgcaaaatgccaggtatggac

SEQ ID NO: 33965 - DNA, 21 bp, synthetic construct
  source 1..21: mol_type = other DNA; mol_type = other DNA
tgtaaagttagcgcgagcgcg

SEQ ID NO: 33966 - DNA, 21 bp, synthetic construct
  source 1..21: mol_type = other DNA; mol_type = other DNA
gtagagccgacgtgtaaagac

SEQ ID NO: 33967 - DNA, 21 bp, synthetic construct
  source 1..21: mol_type = other DNA; mol_type = other DNA
tatttttctaacgtacgtagt

SEQ ID NO: 33968 - DNA, 21 bp, synthetic construct
  source 1..21: mol_type = other DNA; mol_type = other DNA
tgggagtctacgaacggggtc

SEQ ID NO: 33969 - DNA, 21 bp, synthetic construct
  source 1..21: mol_type = other DNA; mol_type = other DNA
ttatggaatggaaccgcacca

SEQ ID NO: 33970 - DNA, 21 bp, synthetic construct
  source 1..21: mol_type = other DNA; mol_type = other DNA
ctgtggcgaacgggcataaat

SEQ ID NO: 33971 - DNA, 21 bp, synthetic construct
  source 1..21: mol_type = other DNA; mol_type = other DNA
tgtagagagtcaactgaaaga

SEQ ID NO: 33972 - DNA, 21 bp, synthetic construct
  source 1..21: mol_type = other DNA; mol_type = other DNA
tacttcagcaacgttaggtcc

SEQ ID NO: 33973 - DNA, 21 bp, synthetic construct
  source 1..21: mol_type = other DNA; mol_type = other DNA
agatcagagtttagaacttat

SEQ ID NO: 33974 - DNA, 21 bp, synthetic construct
  source 1..21: mol_type = other DNA; mol_type = other DNA
atcctccaggacagggggtgg

SEQ ID NO: 33975 - DNA, 21 bp, synthetic construct
  source 1..21: mol_type = other DNA; mol_type = other DNA
aatgaggactgggtaaaatgg

SEQ ID NO: 33976 - DNA, 21 bp, synthetic construct
  source 1..21: mol_type = other DNA; mol_type = other DNA
tatcatgccaaaagcaccaac

SEQ ID NO: 33977 - DNA, 21 bp, synthetic construct
  source 1..21: mol_type = other DNA; mol_type = other DNA
ttagggttaggctgttgcggt

SEQ ID NO: 33978 - DNA, 21 bp, synthetic construct
  source 1..21: mol_type = other DNA; mol_type = other DNA
tgttctaggatcggtccaaat

SEQ ID NO: 33979 - DNA, 21 bp, synthetic construct
  source 1..21: mol_type = other DNA; mol_type = other DNA
agagaggatttcactatgtgg

SEQ ID NO: 33980 - DNA, 21 bp, synthetic construct
  source 1..21: mol_type = other DNA; mol_type = other DNA
tgccccaaaaccaaattagaa

SEQ ID NO: 33981 - DNA, 21 bp, synthetic construct
  source 1..21: mol_type = other DNA; mol_type = other DNA
cgtgaagaaacggttggttgg

SEQ ID NO: 33982 - DNA, 21 bp, synthetic construct
  source 1..21: mol_type = other DNA; mol_type = other DNA
gtccctcagcgctgcgctccc

SEQ ID NO: 33983 - DNA, 21 bp, synthetic construct
  source 1..21: mol_type = other DNA; mol_type = other DNA
tacgacgggagttgcaaggca

SEQ ID NO: 33984 - DNA, 21 bp, synthetic construct
  source 1..21: mol_type = other DNA; mol_type = other DNA
tgcaagaaagacaaagaagta

SEQ ID NO: 33985 - DNA, 21 bp, synthetic construct
  source 1..21: mol_type = other DNA; mol_type = other DNA
aggggagacgacagagggtgg

SEQ ID NO: 33986 - DNA, 21 bp, synthetic construct
  source 1..21: mol_type = other DNA; mol_type = other DNA
tgcgcgccttacacccatgaa

SEQ ID NO: 33987 - DNA, 21 bp, synthetic construct
  source 1..21: mol_type = other DNA; mol_type = other DNA
tattttgctggacgggcggag

SEQ ID NO: 33988 - DNA, 21 bp, synthetic construct
  source 1..21: mol_type = other DNA; mol_type = other DNA
catcatagttctaatggtgtc

SEQ ID NO: 33989 - DNA, 21 bp, synthetic construct
  source 1..21: mol_type = other DNA; mol_type = other DNA
atctactcaaccaacggtgta

SEQ ID NO: 33990 - DNA, 21 bp, synthetic construct
  source 1..21: mol_type = other DNA; mol_type = other DNA
tattctcgtataaataataat

SEQ ID NO: 33991 - DNA, 21 bp, synthetic construct
  source 1..21: mol_type = other DNA; mol_type = other DNA
tacttctctggcttaatggct

SEQ ID NO: 33992 - DNA, 21 bp, synthetic construct
  source 1..21: mol_type = other DNA; mol_type = other DNA
tttgatggtagctgtaaggcg

SEQ ID NO: 33993 - DNA, 21 bp, synthetic construct
  source 1..21: mol_type = other DNA; mol_type = other DNA
tatcacagacagaaccctctt

SEQ ID NO: 33994 - DNA, 21 bp, synthetic construct
  source 1..21: mol_type = other DNA; mol_type = other DNA
aggggggaaacgagcagctgg

SEQ ID NO: 33995 - DNA, 21 bp, synthetic construct
  source 1..21: mol_type = other DNA; mol_type = other DNA
tactactccggcgtagcgtta

SEQ ID NO: 33996 - DNA, 21 bp, synthetic construct
  source 1..21: mol_type = other DNA; mol_type = other DNA
tatgcaagatcgaatcacaat

SEQ ID NO: 33997 - DNA, 21 bp, synthetic construct
  source 1..21: mol_type = other DNA; mol_type = other DNA
tatagcagaactaataacaat

SEQ ID NO: 33998 - DNA, 21 bp, synthetic construct
  source 1..21: mol_type = other DNA; mol_type = other DNA
agcgacggggtttcggcgtgg

SEQ ID NO: 33999 - DNA, 21 bp, synthetic construct
  source 1..21: mol_type = other DNA; mol_type = other DNA
ttttggagcgggaccaaagag

SEQ ID NO: 34000 - DNA, 21 bp, synthetic construct
  source 1..21: mol_type = other DNA; mol_type = other DNA
gggagcgaattcaaatcatat

SEQ ID NO: 34001 - DNA, 21 bp, synthetic construct
  source 1..21: mol_type = other DNA; mol_type = other DNA
actggagattggacaccgttt

SEQ ID NO: 34002 - DNA, 21 bp, synthetic construct
  source 1..21: mol_type = other DNA; mol_type = other DNA
ttttggtccggaacgtttgag

SEQ ID NO: 34003 - DNA, 21 bp, synthetic construct
  source 1..21: mol_type = other DNA; mol_type = other DNA
tttcattcgacaaacggtatt

SEQ ID NO: 34004 - DNA, 21 bp, synthetic construct
  source 1..21: mol_type = other DNA; mol_type = other DNA
ttttcgcgcatgaatcataat

SEQ ID NO: 34005 - DNA, 21 bp, synthetic construct
  source 1..21: mol_type = other DNA; mol_type = other DNA
tactcccgggctaattacaat

SEQ ID NO: 34006 - DNA, 21 bp, synthetic construct
  source 1..21: mol_type = other DNA; mol_type = other DNA
tatcaccgtgctcagatgaat

SEQ ID NO: 34007 - DNA, 21 bp, synthetic construct
  source 1..21: mol_type = other DNA; mol_type = other DNA
tgtactagcaaaataggacat

SEQ ID NO: 34008 - DNA, 21 bp, synthetic construct
  source 1..21: mol_type = other DNA; mol_type = other DNA
tccatgagagatcgatcctgg

SEQ ID NO: 34009 - DNA, 21 bp, synthetic construct
  source 1..21: mol_type = other DNA; mol_type = other DNA
gacatgggaagtgcggcttgg

SEQ ID NO: 34010 - DNA, 21 bp, synthetic construct
  source 1..21: mol_type = other DNA; mol_type = other DNA
tattcaaggtctaatacgaac

SEQ ID NO: 34011 - DNA, 21 bp, synthetic construct
  source 1..21: mol_type = other DNA; mol_type = other DNA
tgcaggtcggaggtagtgaaa

SEQ ID NO: 34012 - DNA, 21 bp, synthetic construct
  source 1..21: mol_type = other DNA; mol_type = other DNA
tacgcaagagcaggtgtcaat

SEQ ID NO: 34013 - DNA, 21 bp, synthetic construct
  source 1..21: mol_type = other DNA; mol_type = other DNA
ggggacgaatatataatgtat

SEQ ID NO: 34014 - DNA, 21 bp, synthetic construct
  source 1..21: mol_type = other DNA; mol_type = other DNA
tatagtaagggcaacactaat

SEQ ID NO: 34015 - DNA, 21 bp, synthetic construct
  source 1..21: mol_type = other DNA; mol_type = other DNA
gttcccactacaccttgtatg

SEQ ID NO: 34016 - DNA, 21 bp, synthetic construct
  source 1..21: mol_type = other DNA; mol_type = other DNA
tacttcatgggggagcgagag

SEQ ID NO: 34017 - DNA, 21 bp, synthetic construct
  source 1..21: mol_type = other DNA; mol_type = other DNA
tactcccgaatattacctaac

SEQ ID NO: 34018 - DNA, 21 bp, synthetic construct
  source 1..21: mol_type = other DNA; mol_type = other DNA
ccgatggggtcggctgagtgg

SEQ ID NO: 34019 - DNA, 21 bp, synthetic construct
  source 1..21: mol_type = other DNA; mol_type = other DNA
tactcgagactagactatgat

SEQ ID NO: 34020 - DNA, 21 bp, synthetic construct
  source 1..21: mol_type = other DNA; mol_type = other DNA
gatgacggtgtgtccaagtgg

SEQ ID NO: 34021 - DNA, 21 bp, synthetic construct
  source 1..21: mol_type = other DNA; mol_type = other DNA
tattttacgggtgcaatggac

SEQ ID NO: 34022 - DNA, 21 bp, synthetic construct
  source 1..21: mol_type = other DNA; mol_type = other DNA
tactccaggttggggggggac

SEQ ID NO: 34023 - DNA, 21 bp, synthetic construct
  source 1..21: mol_type = other DNA; mol_type = other DNA
tacgggacggggacgtggagt

SEQ ID NO: 34024 - DNA, 21 bp, synthetic construct
  source 1..21: mol_type = other DNA; mol_type = other DNA
ccactctcttctggggtatgg

SEQ ID NO: 34025 - DNA, 21 bp, synthetic construct
  source 1..21: mol_type = other DNA; mol_type = other DNA
tgtaaaggtgatgcgaaagca

SEQ ID NO: 34026 - DNA, 21 bp, synthetic construct
  source 1..21: mol_type = other DNA; mol_type = other DNA
atgacgggcacgagctgtagt

SEQ ID NO: 34027 - DNA, 21 bp, synthetic construct
  source 1..21: mol_type = other DNA; mol_type = other DNA
tattttactggtcacaccatg

SEQ ID NO: 34028 - DNA, 21 bp, synthetic construct
  source 1..21: mol_type = other DNA; mol_type = other DNA
caatgcaagccgtgcttgacc

SEQ ID NO: 34029 - DNA, 21 bp, synthetic construct
  source 1..21: mol_type = other DNA; mol_type = other DNA
tattggcacggcaagcccgat

SEQ ID NO: 34030 - DNA, 21 bp, synthetic construct
  source 1..21: mol_type = other DNA; mol_type = other DNA
gtgttctcgagcaacggagtg

SEQ ID NO: 34031 - DNA, 21 bp, synthetic construct
  source 1..21: mol_type = other DNA; mol_type = other DNA
tacattagtacaaacggtagg

SEQ ID NO: 34032 - DNA, 21 bp, synthetic construct
  source 1..21: mol_type = other DNA; mol_type = other DNA
tacgccgcatcgggcagaaat

SEQ ID NO: 34033 - DNA, 21 bp, synthetic construct
  source 1..21: mol_type = other DNA; mol_type = other DNA
tattataccgggcaagtcacg

SEQ ID NO: 34034 - DNA, 21 bp, synthetic construct
  source 1..21: mol_type = other DNA; mol_type = other DNA
ttggcaagaagtggcggggga

SEQ ID NO: 34035 - DNA, 21 bp, synthetic construct
  source 1..21: mol_type = other DNA; mol_type = other DNA
attgatgggtcctgcaaggca

SEQ ID NO: 34036 - DNA, 21 bp, synthetic construct
  source 1..21: mol_type = other DNA; mol_type = other DNA
cagtgtagaccatgctctgaa

SEQ ID NO: 34037 - DNA, 21 bp, synthetic construct
  source 1..21: mol_type = other DNA; mol_type = other DNA
cgcagcgagtaccatttccca

SEQ ID NO: 34038 - DNA, 21 bp, synthetic construct
  source 1..21: mol_type = other DNA; mol_type = other DNA
tatttcagtggtgtcagtcaa

SEQ ID NO: 34039 - DNA, 21 bp, synthetic construct
  source 1..21: mol_type = other DNA; mol_type = other DNA
tattcgaagtacggcatgaat

SEQ ID NO: 34040 - DNA, 21 bp, synthetic construct
  source 1..21: mol_type = other DNA; mol_type = other DNA
tattcggggcaaggatgcgta

SEQ ID NO: 34041 - DNA, 21 bp, synthetic construct
  source 1..21: mol_type = other DNA; mol_type = other DNA
gtgaaaccggataatacgtgc

SEQ ID NO: 34042 - DNA, 21 bp, synthetic construct
  source 1..21: mol_type = other DNA; mol_type = other DNA
tactcacggcacaaccaaaat

SEQ ID NO: 34043 - DNA, 21 bp, synthetic construct
  source 1..21: mol_type = other DNA; mol_type = other DNA
tgcaagccgggccccatcgga

SEQ ID NO: 34044 - DNA, 21 bp, synthetic construct
  source 1..21: mol_type = other DNA; mol_type = other DNA
tatagtagaatgaattacaat

SEQ ID NO: 34045 - DNA, 21 bp, synthetic construct
  source 1..21: mol_type = other DNA; mol_type = other DNA
caaactggtgggggaagctgc

SEQ ID NO: 34046 - DNA, 21 bp, synthetic construct
  source 1..21: mol_type = other DNA; mol_type = other DNA
tatagtagaatgggattcaat

SEQ ID NO: 34047 - DNA, 21 bp, synthetic construct
  source 1..21: mol_type = other DNA; mol_type = other DNA
tacgcacgcatcggagagaat

SEQ ID NO: 34048 - DNA, 21 bp, synthetic construct
  source 1..21: mol_type = other DNA; mol_type = other DNA
tatgcccgcgatgggccaaac

SEQ ID NO: 34049 - DNA, 21 bp, synthetic construct
  source 1..21: mol_type = other DNA; mol_type = other DNA
tattgggctggtataccagaa

SEQ ID NO: 34050 - DNA, 21 bp, synthetic construct
  source 1..21: mol_type = other DNA; mol_type = other DNA
tactatacaggaagaaccgac

SEQ ID NO: 34051 - DNA, 21 bp, synthetic construct
  source 1..21: mol_type = other DNA; mol_type = other DNA
tgcaataaagcaatgaccgct

SEQ ID NO: 34052 - DNA, 21 bp, synthetic construct
  source 1..21: mol_type = other DNA; mol_type = other DNA
ttttggtcaggtaccgtggcc

SEQ ID NO: 34053 - DNA, 21 bp, synthetic construct
  source 1..21: mol_type = other DNA; mol_type = other DNA
aacatgcaggaccgtagttgg

SEQ ID NO: 34054 - DNA, 21 bp, synthetic construct
  source 1..21: mol_type = other DNA; mol_type = other DNA
ccatttgccaaatcacctatg

SEQ ID NO: 34055 - DNA, 21 bp, synthetic construct
  source 1..21: mol_type = other DNA; mol_type = other DNA
tactggtcgggaaaacagagc

SEQ ID NO: 34056 - DNA, 21 bp, synthetic construct
  source 1..21: mol_type = other DNA; mol_type = other DNA
agagaaggtactagttcatgg

SEQ ID NO: 34057 - DNA, 21 bp, synthetic construct
  source 1..21: mol_type = other DNA; mol_type = other DNA
cgggacggtgagtccgcttgg

SEQ ID NO: 34058 - DNA, 21 bp, synthetic construct
  source 1..21: mol_type = other DNA; mol_type = other DNA
atgcgcgacgggactagctca

SEQ ID NO: 34059 - DNA, 21 bp, synthetic construct
  source 1..21: mol_type = other DNA; mol_type = other DNA
tgcaaaatgtcttgccctctt

SEQ ID NO: 34060 - DNA, 21 bp, synthetic construct
  source 1..21: mol_type = other DNA; mol_type = other DNA
tacagccgcggtaatttcaat

SEQ ID NO: 34061 - DNA, 21 bp, synthetic construct
  source 1..21: mol_type = other DNA; mol_type = other DNA
tacagcagaagtaacaacaac

SEQ ID NO: 34062 - DNA, 21 bp, synthetic construct
  source 1..21: mol_type = other DNA; mol_type = other DNA
tgcaaaggcctaaaagtcgag

SEQ ID NO: 34063 - DNA, 21 bp, synthetic construct
  source 1..21: mol_type = other DNA; mol_type = other DNA
cggttatacgatacatttgcc

SEQ ID NO: 34064 - DNA, 21 bp, synthetic construct
  source 1..21: mol_type = other DNA; mol_type = other DNA
tactcgaggaatgggcagaat

SEQ ID NO: 34065 - DNA, 21 bp, synthetic construct
  source 1..21: mol_type = other DNA; mol_type = other DNA
tttgcccgttctggacataat

SEQ ID NO: 34066 - DNA, 21 bp, synthetic construct
  source 1..21: mol_type = other DNA; mol_type = other DNA
aggcagacggcttgtccagct

SEQ ID NO: 34067 - DNA, 21 bp, synthetic construct
  source 1..21: mol_type = other DNA; mol_type = other DNA
tgtaagcctgggagtcctatc

SEQ ID NO: 34068 - DNA, 21 bp, synthetic construct
  source 1..21: mol_type = other DNA; mol_type = other DNA
tactggacagggaaaccagag

SEQ ID NO: 34069 - DNA, 21 bp, synthetic construct
  source 1..21: mol_type = other DNA; mol_type = other DNA
acgttttacggcgatgctgcc

SEQ ID NO: 34070 - DNA, 21 bp, synthetic construct
  source 1..21: mol_type = other DNA; mol_type = other DNA
gaggaggaaaagtgccgtgag

SEQ ID NO: 34071 - DNA, 21 bp, synthetic construct
  source 1..21: mol_type = other DNA; mol_type = other DNA
cacaccatagatagctttcct

SEQ ID NO: 34072 - DNA, 21 bp, synthetic construct
  source 1..21: mol_type = other DNA; mol_type = other DNA
tgcaattttaaaggccctccg

SEQ ID NO: 34073 - DNA, 21 bp, synthetic construct
  source 1..21: mol_type = other DNA; mol_type = other DNA
gggagcgagacctccatgtgg

SEQ ID NO: 34074 - DNA, 21 bp, synthetic construct
  source 1..21: mol_type = other DNA; mol_type = other DNA
ccatacgctaaatcagcgaat

SEQ ID NO: 34075 - DNA, 21 bp, synthetic construct
  source 1..21: mol_type = other DNA; mol_type = other DNA
ttctttcatggcaaagtggag

SEQ ID NO: 34076 - DNA, 21 bp, synthetic construct
  source 1..21: mol_type = other DNA; mol_type = other DNA
aataaggaaggctgtaagccc

SEQ ID NO: 34077 - DNA, 21 bp, synthetic construct
  source 1..21: mol_type = other DNA; mol_type = other DNA
tattggacggcaaaacctgat

SEQ ID NO: 34078 - DNA, 21 bp, synthetic construct
  source 1..21: mol_type = other DNA; mol_type = other DNA
agagatgacttcgttagcttc

SEQ ID NO: 34079 - DNA, 21 bp, synthetic construct
  source 1..21: mol_type = other DNA; mol_type = other DNA
tggacgtcgtctaatggtgtt

SEQ ID NO: 34080 - DNA, 21 bp, synthetic construct
  source 1..21: mol_type = other DNA; mol_type = other DNA
tgtttctcaaagactggtcac

SEQ ID NO: 34081 - DNA, 21 bp, synthetic construct
  source 1..21: mol_type = other DNA; mol_type = other DNA
attgactcagggaaagcctgt

SEQ ID NO: 34082 - DNA, 21 bp, synthetic construct
  source 1..21: mol_type = other DNA; mol_type = other DNA
atggagagaacgcagatgtgc

SEQ ID NO: 34083 - DNA, 21 bp, synthetic construct
  source 1..21: mol_type = other DNA; mol_type = other DNA
tattcaaaaaataatatcaac

SEQ ID NO: 34084 - DNA, 21 bp, synthetic construct
  source 1..21: mol_type = other DNA; mol_type = other DNA
gtgatggacgggcttaggtgg

SEQ ID NO: 34085 - DNA, 21 bp, synthetic construct
  source 1..21: mol_type = other DNA; mol_type = other DNA
tattcccggaatggtagtaac

SEQ ID NO: 34086 - DNA, 21 bp, synthetic construct
  source 1..21: mol_type = other DNA; mol_type = other DNA
tatagtcgcaactcaccaaac

SEQ ID NO: 34087 - DNA, 21 bp, synthetic construct
  source 1..21: mol_type = other DNA; mol_type = other DNA
gacgatggccgaagcaggtat

SEQ ID NO: 34088 - DNA, 21 bp, synthetic construct
  source 1..21: mol_type = other DNA; mol_type = other DNA
tattggagtcacgttaaagag

SEQ ID NO: 34089 - DNA, 21 bp, synthetic construct
  source 1..21: mol_type = other DNA; mol_type = other DNA
tacgcgcgcggttcgattaat

SEQ ID NO: 34090 - DNA, 21 bp, synthetic construct
  source 1..21: mol_type = other DNA; mol_type = other DNA
tacttttcaggacgaatacag

SEQ ID NO: 34091 - DNA, 21 bp, synthetic construct
  source 1..21: mol_type = other DNA; mol_type = other DNA
tatcaccgtcttggtgaacct

SEQ ID NO: 34092 - DNA, 21 bp, synthetic construct
  source 1..21: mol_type = other DNA; mol_type = other DNA
ttacataggttgcatcaagac

SEQ ID NO: 34093 - DNA, 21 bp, synthetic construct
  source 1..21: mol_type = other DNA; mol_type = other DNA
aggacttgggacgctattgtt

SEQ ID NO: 34094 - DNA, 21 bp, synthetic construct
  source 1..21: mol_type = other DNA; mol_type = other DNA
gtgaaaagtagcgaagcttgc

SEQ ID NO: 34095 - DNA, 21 bp, synthetic construct
  source 1..21: mol_type = other DNA; mol_type = other DNA
ttcttcactggcaaacttgac

SEQ ID NO: 34096 - DNA, 21 bp, synthetic construct
  source 1..21: mol_type = other DNA; mol_type = other DNA
tatgctaaaatgggctataac

SEQ ID NO: 34097 - DNA, 21 bp, synthetic construct
  source 1..21: mol_type = other DNA; mol_type = other DNA
tatagcaagtatggcttaaat

SEQ ID NO: 34098 - DNA, 21 bp, synthetic construct
  source 1..21: mol_type = other DNA; mol_type = other DNA
tattatagtggagtaagggac

SEQ ID NO: 34099 - DNA, 21 bp, synthetic construct
  source 1..21: mol_type = other DNA; mol_type = other DNA
cctggtccgatgaagccctgc

SEQ ID NO: 34100 - DNA, 21 bp, synthetic construct
  source 1..21: mol_type = other DNA; mol_type = other DNA
tgcagtggaagaccacaggag

SEQ ID NO: 34101 - DNA, 21 bp, synthetic construct
  source 1..21: mol_type = other DNA; mol_type = other DNA
tgcaatcatcctatgacagcg

SEQ ID NO: 34102 - DNA, 21 bp, synthetic construct
  source 1..21: mol_type = other DNA; mol_type = other DNA
agaagcgagacctcatcatgg

SEQ ID NO: 34103 - DNA, 21 bp, synthetic construct
  source 1..21: mol_type = other DNA; mol_type = other DNA
tactggacgggcatgcccgag

SEQ ID NO: 34104 - DNA, 21 bp, synthetic construct
  source 1..21: mol_type = other DNA; mol_type = other DNA
ttctggtctggaatggttgct

SEQ ID NO: 34105 - DNA, 21 bp, synthetic construct
  source 1..21: mol_type = other DNA; mol_type = other DNA
ctacctcggacaggcgattgc

SEQ ID NO: 34106 - DNA, 21 bp, synthetic construct
  source 1..21: mol_type = other DNA; mol_type = other DNA
tattggcaaggtaagatagac

SEQ ID NO: 34107 - DNA, 21 bp, synthetic construct
  source 1..21: mol_type = other DNA; mol_type = other DNA
ttagatgattggacgggcttc

SEQ ID NO: 34108 - DNA, 21 bp, synthetic construct
  source 1..21: mol_type = other DNA; mol_type = other DNA
tacagcagaatcggtcctatc

SEQ ID NO: 34109 - DNA, 21 bp, synthetic construct
  source 1..21: mol_type = other DNA; mol_type = other DNA
aaggaagggacctctaggtgg

SEQ ID NO: 34110 - DNA, 21 bp, synthetic construct
  source 1..21: mol_type = other DNA; mol_type = other DNA
ttcagtcgggccggctcaaat

SEQ ID NO: 34111 - DNA, 21 bp, synthetic construct
  source 1..21: mol_type = other DNA; mol_type = other DNA
tgtttgagagcgaggccggag

SEQ ID NO: 34112 - DNA, 21 bp, synthetic construct
  source 1..21: mol_type = other DNA; mol_type = other DNA
aaggcggatcacctaaagtgg

SEQ ID NO: 34113 - DNA, 21 bp, synthetic construct
  source 1..21: mol_type = other DNA; mol_type = other DNA
ggcggtcccggttcgatttgg

SEQ ID NO: 34114 - DNA, 21 bp, synthetic construct
  source 1..21: mol_type = other DNA; mol_type = other DNA
gacaggaaaccgtgccccgca

SEQ ID NO: 34115 - DNA, 21 bp, synthetic construct
  source 1..21: mol_type = other DNA; mol_type = other DNA
tattttacacatcgatacgac

SEQ ID NO: 34116 - DNA, 21 bp, synthetic construct
  source 1..21: mol_type = other DNA; mol_type = other DNA
tatcatcgtttagataacgac

SEQ ID NO: 34117 - DNA, 21 bp, synthetic construct
  source 1..21: mol_type = other DNA; mol_type = other DNA
ttctcccgccttggggagaac

SEQ ID NO: 34118 - DNA, 21 bp, synthetic construct
  source 1..21: mol_type = other DNA; mol_type = other DNA
agaaacgaattctcaggcttc

SEQ ID NO: 34119 - DNA, 21 bp, synthetic construct
  source 1..21: mol_type = other DNA; mol_type = other DNA
atctgtaggccatgtagcgag

SEQ ID NO: 34120 - DNA, 21 bp, synthetic construct
  source 1..21: mol_type = other DNA; mol_type = other DNA
ggtggtggatccagcagctgg

SEQ ID NO: 34121 - DNA, 21 bp, synthetic construct
  source 1..21: mol_type = other DNA; mol_type = other DNA
tactggtccgctgttacagag

SEQ ID NO: 34122 - DNA, 21 bp, synthetic construct
  source 1..21: mol_type = other DNA; mol_type = other DNA
gcaggagctacgtccacttgg

SEQ ID NO: 34123 - DNA, 21 bp, synthetic construct
  source 1..21: mol_type = other DNA; mol_type = other DNA
tgcaaagctagaccctgtggt

SEQ ID NO: 34124 - DNA, 21 bp, synthetic construct
  source 1..21: mol_type = other DNA; mol_type = other DNA
cgctctgagtttacggtgttt

SEQ ID NO: 34125 - DNA, 21 bp, synthetic construct
  source 1..21: mol_type = other DNA; mol_type = other DNA
tgtaaggcatcaaagtgcgca

SEQ ID NO: 34126 - DNA, 21 bp, synthetic construct
  source 1..21: mol_type = other DNA; mol_type = other DNA
tgtaaaacgataacgaatgac

SEQ ID NO: 34127 - DNA, 21 bp, synthetic construct
  source 1..21: mol_type = other DNA; mol_type = other DNA
gggggtgggactagcaaatgg

SEQ ID NO: 34128 - DNA, 21 bp, synthetic construct
  source 1..21: mol_type = other DNA; mol_type = other DNA
tattcgagaataaattttaac

SEQ ID NO: 34129 - DNA, 21 bp, synthetic construct
  source 1..21: mol_type = other DNA; mol_type = other DNA
tgtaataaaccgcaaacggca

SEQ ID NO: 34130 - DNA, 21 bp, synthetic construct
  source 1..21: mol_type = other DNA; mol_type = other DNA
aatgtatccgaatggcggaat

SEQ ID NO: 34131 - DNA, 21 bp, synthetic construct
  source 1..21: mol_type = other DNA; mol_type = other DNA
catgacgatttcaccgtcatg

SEQ ID NO: 34132 - DNA, 21 bp, synthetic construct
  source 1..21: mol_type = other DNA; mol_type = other DNA
cgttcgtatgatacctatccg

SEQ ID NO: 34133 - DNA, 21 bp, synthetic construct
  source 1..21: mol_type = other DNA; mol_type = other DNA
gactggcatggtttgatagct

SEQ ID NO: 34134 - DNA, 21 bp, synthetic construct
  source 1..21: mol_type = other DNA; mol_type = other DNA
gtgcctgacgctgttcgctgg

SEQ ID NO: 34135 - DNA, 21 bp, synthetic construct
  source 1..21: mol_type = other DNA; mol_type = other DNA
ggcgacgcgttatcgcactgg

SEQ ID NO: 34136 - DNA, 21 bp, synthetic construct
  source 1..21: mol_type = other DNA; mol_type = other DNA
gatatggcgtcaatgaagtgg

SEQ ID NO: 34137 - DNA, 21 bp, synthetic construct
  source 1..21: mol_type = other DNA; mol_type = other DNA
aacaaatcggagggcgcttgt

SEQ ID NO: 34138 - DNA, 21 bp, synthetic construct
  source 1..21: mol_type = other DNA; mol_type = other DNA
tggttcagcggtatcacggag

SEQ ID NO: 34139 - DNA, 21 bp, synthetic construct
  source 1..21: mol_type = other DNA; mol_type = other DNA
ccctttgccaggtcagctgaa

SEQ ID NO: 34140 - DNA, 21 bp, synthetic construct
  source 1..21: mol_type = other DNA; mol_type = other DNA
agtgggaaatgcgcggcaacc

SEQ ID NO: 34141 - DNA, 21 bp, synthetic construct
  source 1..21: mol_type = other DNA; mol_type = other DNA
tttttttcaggacgccatgaa

SEQ ID NO: 34142 - DNA, 21 bp, synthetic construct
  source 1..21: mol_type = other DNA; mol_type = other DNA
tacagccgccatggaatcaac

SEQ ID NO: 34143 - DNA, 21 bp, synthetic construct
  source 1..21: mol_type = other DNA; mol_type = other DNA
tattggtctgcaaaattagac

SEQ ID NO: 34144 - DNA, 21 bp, synthetic construct
  source 1..21: mol_type = other DNA; mol_type = other DNA
tacgcccggatgggcaacaat

SEQ ID NO: 34145 - DNA, 21 bp, synthetic construct
  source 1..21: mol_type = other DNA; mol_type = other DNA
atgacggtcgattgctctagg

SEQ ID NO: 34146 - DNA, 21 bp, synthetic construct
  source 1..21: mol_type = other DNA; mol_type = other DNA
tgtaaaccgccgttcgttgcc

SEQ ID NO: 34147 - DNA, 21 bp, synthetic construct
  source 1..21: mol_type = other DNA; mol_type = other DNA
ttctacagtggtgttaaggag

SEQ ID NO: 34148 - DNA, 21 bp, synthetic construct
  source 1..21: mol_type = other DNA; mol_type = other DNA
tattggtcagggactagggcc

SEQ ID NO: 34149 - DNA, 21 bp, synthetic construct
  source 1..21: mol_type = other DNA; mol_type = other DNA
tattcaaagtcgaacgagaac

SEQ ID NO: 34150 - DNA, 21 bp, synthetic construct
  source 1..21: mol_type = other DNA; mol_type = other DNA
gacgggtatagcggtagagac

SEQ ID NO: 34151 - DNA, 21 bp, synthetic construct
  source 1..21: mol_type = other DNA; mol_type = other DNA
accgacggatatagtcgatat

SEQ ID NO: 34152 - DNA, 21 bp, synthetic construct
  source 1..21: mol_type = other DNA; mol_type = other DNA
gcgatgggagatagagggtgg

SEQ ID NO: 34153 - DNA, 21 bp, synthetic construct
  source 1..21: mol_type = other DNA; mol_type = other DNA
gttgggataaactgcaaggag

SEQ ID NO: 34154 - DNA, 21 bp, synthetic construct
  source 1..21: mol_type = other DNA; mol_type = other DNA
tgtaataaaatgatgaccgcg

SEQ ID NO: 34155 - DNA, 21 bp, synthetic construct
  source 1..21: mol_type = other DNA; mol_type = other DNA
tggaacagcacaaacggggtt

SEQ ID NO: 34156 - DNA, 21 bp, synthetic construct
  source 1..21: mol_type = other DNA; mol_type = other DNA
ggaggtggtactgtacgctgg

SEQ ID NO: 34157 - DNA, 21 bp, synthetic construct
  source 1..21: mol_type = other DNA; mol_type = other DNA
tactttaccggacgacccatg

SEQ ID NO: 34158 - DNA, 21 bp, synthetic construct
  source 1..21: mol_type = other DNA; mol_type = other DNA
tgtaagccaaactcaggtggc

SEQ ID NO: 34159 - DNA, 21 bp, synthetic construct
  source 1..21: mol_type = other DNA; mol_type = other DNA
ggatcagacactagcagatgg

SEQ ID NO: 34160 - DNA, 21 bp, synthetic construct
  source 1..21: mol_type = other DNA; mol_type = other DNA
ttgtcaaaaattggaacgaac

SEQ ID NO: 34161 - DNA, 21 bp, synthetic construct
  source 1..21: mol_type = other DNA; mol_type = other DNA
tggacagggatgtgcaaggct

SEQ ID NO: 34162 - DNA, 21 bp, synthetic construct
  source 1..21: mol_type = other DNA; mol_type = other DNA
tgtgcaccttacttacatagc

SEQ ID NO: 34163 - DNA, 21 bp, synthetic construct
  source 1..21: mol_type = other DNA; mol_type = other DNA
ggggtcgaaagcgtcaggtgg

SEQ ID NO: 34164 - DNA, 21 bp, synthetic construct
  source 1..21: mol_type = other DNA; mol_type = other DNA
tatagcaagcaaaattcgaat

SEQ ID NO: 34165 - DNA, 21 bp, synthetic construct
  source 1..21: mol_type = other DNA; mol_type = other DNA
cggaacgagtttcagtcatat

SEQ ID NO: 34166 - DNA, 21 bp, synthetic construct
  source 1..21: mol_type = other DNA; mol_type = other DNA
accaataacgcgaaggattgt

SEQ ID NO: 34167 - DNA, 21 bp, synthetic construct
  source 1..21: mol_type = other DNA; mol_type = other DNA
agagatgactttgtatcgttc

SEQ ID NO: 34168 - DNA, 21 bp, synthetic construct
  source 1..21: mol_type = other DNA; mol_type = other DNA
tattggtcagagattcgtgca

SEQ ID NO: 34169 - DNA, 21 bp, synthetic construct
  source 1..21: mol_type = other DNA; mol_type = other DNA
tgtaacaagccacagactgcc

SEQ ID NO: 34170 - DNA, 21 bp, synthetic construct
  source 1..21: mol_type = other DNA; mol_type = other DNA
actaatcgagaaggagagtgt

SEQ ID NO: 34171 - DNA, 21 bp, synthetic construct
  source 1..21: mol_type = other DNA; mol_type = other DNA
ttgagtaaggctaacataaat

SEQ ID NO: 34172 - DNA, 21 bp, synthetic construct
  source 1..21: mol_type = other DNA; mol_type = other DNA
ctagcgaaaactgcatgcaac

SEQ ID NO: 34173 - DNA, 21 bp, synthetic construct
  source 1..21: mol_type = other DNA; mol_type = other DNA
tgtaaacccgtgcctccagaa

SEQ ID NO: 34174 - DNA, 21 bp, synthetic construct
  source 1..21: mol_type = other DNA; mol_type = other DNA
tgccaaagcaaaaatggagtg

SEQ ID NO: 34175 - DNA, 21 bp, synthetic construct
  source 1..21: mol_type = other DNA; mol_type = other DNA
aggaattacgatacgtatccc

SEQ ID NO: 34176 - DNA, 21 bp, synthetic construct
  source 1..21: mol_type = other DNA; mol_type = other DNA
tttgcgcgctcaggtgcaaat

SEQ ID NO: 34177 - DNA, 21 bp, synthetic construct
  source 1..21: mol_type = other DNA; mol_type = other DNA
tattggtccggcaccgtaaaa

SEQ ID NO: 34178 - DNA, 21 bp, synthetic construct
  source 1..21: mol_type = other DNA; mol_type = other DNA
gcggatggagtgtcgaagtgg

SEQ ID NO: 34179 - DNA, 21 bp, synthetic construct
  source 1..21: mol_type = other DNA; mol_type = other DNA
tacgctcgactcagcataaac

SEQ ID NO: 34180 - DNA, 21 bp, synthetic construct
  source 1..21: mol_type = other DNA; mol_type = other DNA
tattacacggggatcagcgaa

SEQ ID NO: 34181 - DNA, 21 bp, synthetic construct
  source 1..21: mol_type = other DNA; mol_type = other DNA
ttctcaacgcactgctgtgca

SEQ ID NO: 34182 - DNA, 21 bp, synthetic construct
  source 1..21: mol_type = other DNA; mol_type = other DNA
ttttccaggttgaatggaaac

SEQ ID NO: 34183 - DNA, 21 bp, synthetic construct
  source 1..21: mol_type = other DNA; mol_type = other DNA
gacatgcgcgatcatcgctgg

SEQ ID NO: 34184 - DNA, 21 bp, synthetic construct
  source 1..21: mol_type = other DNA; mol_type = other DNA
aaggatgactggaactcgttt

SEQ ID NO: 34185 - DNA, 21 bp, synthetic construct
  source 1..21: mol_type = other DNA; mol_type = other DNA
atcttgaagtcttgcccgata

SEQ ID NO: 34186 - DNA, 21 bp, synthetic construct
  source 1..21: mol_type = other DNA; mol_type = other DNA
ttctggacgggcatgcgtgag

SEQ ID NO: 34187 - DNA, 21 bp, synthetic construct
  source 1..21: mol_type = other DNA; mol_type = other DNA
tatgattacgatgcatatccc

SEQ ID NO: 34188 - DNA, 21 bp, synthetic construct
  source 1..21: mol_type = other DNA; mol_type = other DNA
cgatctgaatttaggagttac

SEQ ID NO: 34189 - DNA, 21 bp, synthetic construct
  source 1..21: mol_type = other DNA; mol_type = other DNA
tggcttaagtctcaagggaac

SEQ ID NO: 34190 - DNA, 21 bp, synthetic construct
  source 1..21: mol_type = other DNA; mol_type = other DNA
tactgggggggtattccagac

SEQ ID NO: 34191 - DNA, 21 bp, synthetic construct
  source 1..21: mol_type = other DNA; mol_type = other DNA
tatagtcggatgaatcacaac

SEQ ID NO: 34192 - DNA, 21 bp, synthetic construct
  source 1..21: mol_type = other DNA; mol_type = other DNA
agaactccaacgtgtaaggaa

SEQ ID NO: 34193 - DNA, 21 bp, synthetic construct
  source 1..21: mol_type = other DNA; mol_type = other DNA
tatgcccgcttatcccctatg

SEQ ID NO: 34194 - DNA, 21 bp, synthetic construct
  source 1..21: mol_type = other DNA; mol_type = other DNA
tactgggggggggtaaccgcc

SEQ ID NO: 34195 - DNA, 21 bp, synthetic construct
  source 1..21: mol_type = other DNA; mol_type = other DNA
tgcaaaccgggggctggcatc

SEQ ID NO: 34196 - DNA, 21 bp, synthetic construct
  source 1..21: mol_type = other DNA; mol_type = other DNA
atgacttacgactcatatgat

SEQ ID NO: 34197 - DNA, 21 bp, synthetic construct
  source 1..21: mol_type = other DNA; mol_type = other DNA
atgtcacgcgtatcaaataac

SEQ ID NO: 34198 - DNA, 21 bp, synthetic construct
  source 1..21: mol_type = other DNA; mol_type = other DNA
cacggtagcactaatggcaaa

SEQ ID NO: 34199 - DNA, 21 bp, synthetic construct
  source 1..21: mol_type = other DNA; mol_type = other DNA
gtgttaagcagcgtaagttgg

SEQ ID NO: 34200 - DNA, 21 bp, synthetic construct
  source 1..21: mol_type = other DNA; mol_type = other DNA
tatagccgcgtctcggacacc

SEQ ID NO: 34201 - DNA, 21 bp, synthetic construct
  source 1..21: mol_type = other DNA; mol_type = other DNA
tacacgagacttaacccgatg

SEQ ID NO: 34202 - DNA, 21 bp, synthetic construct
  source 1..21: mol_type = other DNA; mol_type = other DNA
ggtaatgaggccggtaagtgc

SEQ ID NO: 34203 - DNA, 21 bp, synthetic construct
  source 1..21: mol_type = other DNA; mol_type = other DNA
tgcaagcctccagtcgacgcc

SEQ ID NO: 34204 - DNA, 21 bp, synthetic construct
  source 1..21: mol_type = other DNA; mol_type = other DNA
tatatgaagtacgatacgcag

SEQ ID NO: 34205 - DNA, 21 bp, synthetic construct
  source 1..21: mol_type = other DNA; mol_type = other DNA
tattggagcgggagagcggat

SEQ ID NO: 34206 - DNA, 21 bp, synthetic construct
  source 1..21: mol_type = other DNA; mol_type = other DNA
tactcgcgttcaaacccgaac

SEQ ID NO: 34207 - DNA, 21 bp, synthetic construct
  source 1..21: mol_type = other DNA; mol_type = other DNA
tacttctccggcatgacgtca

SEQ ID NO: 34208 - DNA, 21 bp, synthetic construct
  source 1..21: mol_type = other DNA; mol_type = other DNA
cgcctggagagtatcagctgg

SEQ ID NO: 34209 - DNA, 21 bp, synthetic construct
  source 1..21: mol_type = other DNA; mol_type = other DNA
ggctctggcaaccagaggtgg

SEQ ID NO: 34210 - DNA, 21 bp, synthetic construct
  source 1..21: mol_type = other DNA; mol_type = other DNA
tactcgcgccacaactcgaat

SEQ ID NO: 34211 - DNA, 21 bp, synthetic construct
  source 1..21: mol_type = other DNA; mol_type = other DNA
tgtaaacttttaggtaaagat

SEQ ID NO: 34212 - DNA, 21 bp, synthetic construct
  source 1..21: mol_type = other DNA; mol_type = other DNA
tgcaagaccagccccctgggc

SEQ ID NO: 34213 - DNA, 21 bp, synthetic construct
  source 1..21: mol_type = other DNA; mol_type = other DNA
atgcaccgcctacaagaggat

SEQ ID NO: 34214 - DNA, 21 bp, synthetic construct
  source 1..21: mol_type = other DNA; mol_type = other DNA
tacgctagaatgggcgctaat

SEQ ID NO: 34215 - DNA, 21 bp, synthetic construct
  source 1..21: mol_type = other DNA; mol_type = other DNA
tattctagacatggggttaac

SEQ ID NO: 34216 - DNA, 21 bp, synthetic construct
  source 1..21: mol_type = other DNA; mol_type = other DNA
ggtagtgaattccgctcgtgg

SEQ ID NO: 34217 - DNA, 21 bp, synthetic construct
  source 1..21: mol_type = other DNA; mol_type = other DNA
tacgtgcgattcgacaataac

SEQ ID NO: 34218 - DNA, 21 bp, synthetic construct
  source 1..21: mol_type = other DNA; mol_type = other DNA
gggtgtggcacgaagattggg

SEQ ID NO: 34219 - DNA, 21 bp, synthetic construct
  source 1..21: mol_type = other DNA; mol_type = other DNA
tggtggcatgggaaaccagac

SEQ ID NO: 34220 - DNA, 21 bp, synthetic construct
  source 1..21: mol_type = other DNA; mol_type = other DNA
caatatgccagaagcatgatg

SEQ ID NO: 34221 - DNA, 21 bp, synthetic construct
  source 1..21: mol_type = other DNA; mol_type = other DNA
tgcaagattccagaaaaagtc

SEQ ID NO: 34222 - DNA, 21 bp, synthetic construct
  source 1..21: mol_type = other DNA; mol_type = other DNA
ttctcccggcaaaactacaac

SEQ ID NO: 34223 - DNA, 21 bp, synthetic construct
  source 1..21: mol_type = other DNA; mol_type = other DNA
ctctggaacggtacaccttca

SEQ ID NO: 34224 - DNA, 21 bp, synthetic construct
  source 1..21: mol_type = other DNA; mol_type = other DNA
cgcggagggagcagtgggtgg

SEQ ID NO: 34225 - DNA, 21 bp, synthetic construct
  source 1..21: mol_type = other DNA; mol_type = other DNA
atgactggcacacagtgcttg

SEQ ID NO: 34226 - DNA, 21 bp, synthetic construct
  source 1..21: mol_type = other DNA; mol_type = other DNA
tactggagcggtatcccacca

SEQ ID NO: 34227 - DNA, 21 bp, synthetic construct
  source 1..21: mol_type = other DNA; mol_type = other DNA
ttatcgaggattaattttaac

SEQ ID NO: 34228 - DNA, 21 bp, synthetic construct
  source 1..21: mol_type = other DNA; mol_type = other DNA
cgcgaccagttcagcacgtat

SEQ ID NO: 34229 - DNA, 21 bp, synthetic construct
  source 1..21: mol_type = other DNA; mol_type = other DNA
tatgtcaagacggatatgtat

SEQ ID NO: 34230 - DNA, 21 bp, synthetic construct
  source 1..21: mol_type = other DNA; mol_type = other DNA
tgtaagggtttgaaggtagaa

SEQ ID NO: 34231 - DNA, 21 bp, synthetic construct
  source 1..21: mol_type = other DNA; mol_type = other DNA
tattccagggagggtcctaat

SEQ ID NO: 34232 - DNA, 21 bp, synthetic construct
  source 1..21: mol_type = other DNA; mol_type = other DNA
tattcaaggactaacacaaat

SEQ ID NO: 34233 - DNA, 21 bp, synthetic construct
  source 1..21: mol_type = other DNA; mol_type = other DNA
tactctagaatgaacaataat

SEQ ID NO: 34234 - DNA, 21 bp, synthetic construct
  source 1..21: mol_type = other DNA; mol_type = other DNA
cgtaatggtacgtcatcttgg

SEQ ID NO: 34235 - DNA, 21 bp, synthetic construct
  source 1..21: mol_type = other DNA; mol_type = other DNA
cagagtaaagctagtgaatgt

SEQ ID NO: 34236 - DNA, 21 bp, synthetic construct
  source 1..21: mol_type = other DNA; mol_type = other DNA
tacgctagagggagttgtgac

SEQ ID NO: 34237 - DNA, 21 bp, synthetic construct
  source 1..21: mol_type = other DNA; mol_type = other DNA
tattcccggcatggaatgaat

SEQ ID NO: 34238 - DNA, 21 bp, synthetic construct
  source 1..21: mol_type = other DNA; mol_type = other DNA
tttagtagagccggacaaaac

SEQ ID NO: 34239 - DNA, 21 bp, synthetic construct
  source 1..21: mol_type = other DNA; mol_type = other DNA
ccgttcgctcgcagtgccgag

SEQ ID NO: 34240 - DNA, 21 bp, synthetic construct
  source 1..21: mol_type = other DNA; mol_type = other DNA
tatagccgtattaaccttaac

SEQ ID NO: 34241 - DNA, 21 bp, synthetic construct
  source 1..21: mol_type = other DNA; mol_type = other DNA
cacatgagtacaaacggggtc

SEQ ID NO: 34242 - DNA, 21 bp, synthetic construct
  source 1..21: mol_type = other DNA; mol_type = other DNA
ggaggcgagagtgtgaggtgg

SEQ ID NO: 34243 - DNA, 21 bp, synthetic construct
  source 1..21: mol_type = other DNA; mol_type = other DNA
tggttcagtggaagagtagaa

SEQ ID NO: 34244 - DNA, 21 bp, synthetic construct
  source 1..21: mol_type = other DNA; mol_type = other DNA
tgtcagtcgaaaacaggacac

SEQ ID NO: 34245 - DNA, 21 bp, synthetic construct
  source 1..21: mol_type = other DNA; mol_type = other DNA
ttttcaagacaaaacttcaac

SEQ ID NO: 34246 - DNA, 21 bp, synthetic construct
  source 1..21: mol_type = other DNA; mol_type = other DNA
ttttttactggtgtcctagcc

SEQ ID NO: 34247 - DNA, 21 bp, synthetic construct
  source 1..21: mol_type = other DNA; mol_type = other DNA
gtaatgggtgctagggactgg

SEQ ID NO: 34248 - DNA, 21 bp, synthetic construct
  source 1..21: mol_type = other DNA; mol_type = other DNA
tggaatccgatgtgtaaagct

SEQ ID NO: 34249 - DNA, 21 bp, synthetic construct
  source 1..21: mol_type = other DNA; mol_type = other DNA
gtgttatcatccgtcagttgg

SEQ ID NO: 34250 - DNA, 21 bp, synthetic construct
  source 1..21: mol_type = other DNA; mol_type = other DNA
gtagagtttgagtggtcggat

SEQ ID NO: 34251 - DNA, 21 bp, synthetic construct
  source 1..21: mol_type = other DNA; mol_type = other DNA
tactggtcgcatgtcaaggaa

SEQ ID NO: 34252 - DNA, 21 bp, synthetic construct
  source 1..21: mol_type = other DNA; mol_type = other DNA
caccctagtcgttgtcctgag

SEQ ID NO: 34253 - DNA, 21 bp, synthetic construct
  source 1..21: mol_type = other DNA; mol_type = other DNA
tatttcagtgggactaacaat

SEQ ID NO: 34254 - DNA, 21 bp, synthetic construct
  source 1..21: mol_type = other DNA; mol_type = other DNA
accaaagagcaaggagactgc

SEQ ID NO: 34255 - DNA, 21 bp, synthetic construct
  source 1..21: mol_type = other DNA; mol_type = other DNA
tattggtctcaagtcattgag

SEQ ID NO: 34256 - DNA, 21 bp, synthetic construct
  source 1..21: mol_type = other DNA; mol_type = other DNA
taccaaagcagcaatggggta

SEQ ID NO: 34257 - DNA, 21 bp, synthetic construct
  source 1..21: mol_type = other DNA; mol_type = other DNA
ttgccaaaggacaagtgtcct

SEQ ID NO: 34258 - DNA, 21 bp, synthetic construct
  source 1..21: mol_type = other DNA; mol_type = other DNA
tactggacgggccaacttgcg

SEQ ID NO: 34259 - DNA, 21 bp, synthetic construct
  source 1..21: mol_type = other DNA; mol_type = other DNA
ggcggaggcagctcaaagtgg

SEQ ID NO: 34260 - DNA, 21 bp, synthetic construct
  source 1..21: mol_type = other DNA; mol_type = other DNA
tatgccaggcacgggaataac

SEQ ID NO: 34261 - DNA, 21 bp, synthetic construct
  source 1..21: mol_type = other DNA; mol_type = other DNA
tattacactggggttagagac

SEQ ID NO: 34262 - DNA, 21 bp, synthetic construct
  source 1..21: mol_type = other DNA; mol_type = other DNA
ttcttcagcgggcggctggac

SEQ ID NO: 34263 - DNA, 21 bp, synthetic construct
  source 1..21: mol_type = other DNA; mol_type = other DNA
aaagatgattacgtaccgtgg

SEQ ID NO: 34264 - DNA, 21 bp, synthetic construct
  source 1..21: mol_type = other DNA; mol_type = other DNA
tatgctcggggcagcaacaat

SEQ ID NO: 34265 - DNA, 21 bp, synthetic construct
  source 1..21: mol_type = other DNA; mol_type = other DNA
aaagatgattacgtttttttt

SEQ ID NO: 34266 - DNA, 21 bp, synthetic construct
  source 1..21: mol_type = other DNA; mol_type = other DNA
tgcaagccgggacagctcccg

SEQ ID NO: 34267 - DNA, 21 bp, synthetic construct
  source 1..21: mol_type = other DNA; mol_type = other DNA
agggaggaggaagtattcccg

SEQ ID NO: 34268 - DNA, 21 bp, synthetic construct
  source 1..21: mol_type = other DNA; mol_type = other DNA
tatgcgaagggtggtcataac

SEQ ID NO: 34269 - DNA, 21 bp, synthetic construct
  source 1..21: mol_type = other DNA; mol_type = other DNA
gtccccatgctcggggcaggg

SEQ ID NO: 34270 - DNA, 21 bp, synthetic construct
  source 1..21: mol_type = other DNA; mol_type = other DNA
tatgccaggatgggcttaaat

SEQ ID NO: 34271 - DNA, 21 bp, synthetic construct
  source 1..21: mol_type = other DNA; mol_type = other DNA
tactttagtggccgtgaggat

SEQ ID NO: 34272 - DNA, 21 bp, synthetic construct
  source 1..21: mol_type = other DNA; mol_type = other DNA
tacctaaaaaatgatcctacc

SEQ ID NO: 34273 - DNA, 21 bp, synthetic construct
  source 1..21: mol_type = other DNA; mol_type = other DNA
tatcatgcattgaacaagcct

SEQ ID NO: 34274 - DNA, 21 bp, synthetic construct
  source 1..21: mol_type = other DNA; mol_type = other DNA
ggagatgagtacctgatgttc

SEQ ID NO: 34275 - DNA, 21 bp, synthetic construct
  source 1..21: mol_type = other DNA; mol_type = other DNA
tacgccaagcaggggttcaac

SEQ ID NO: 34276 - DNA, 21 bp, synthetic construct
  source 1..21: mol_type = other DNA; mol_type = other DNA
tgtaactcccagaaactcggc

SEQ ID NO: 34277 - DNA, 21 bp, synthetic construct
  source 1..21: mol_type = other DNA; mol_type = other DNA
tatgcaaggggcagcatcaac

SEQ ID NO: 34278 - DNA, 21 bp, synthetic construct
  source 1..21: mol_type = other DNA; mol_type = other DNA
gatttaaggaccgccgcttgg

SEQ ID NO: 34279 - DNA, 21 bp, synthetic construct
  source 1..21: mol_type = other DNA; mol_type = other DNA
ggcggtacaggaagttcctgg

SEQ ID NO: 34280 - DNA, 21 bp, synthetic construct
  source 1..21: mol_type = other DNA; mol_type = other DNA
tgtaacgggccaatgacggcc

SEQ ID NO: 34281 - DNA, 21 bp, synthetic construct
  source 1..21: mol_type = other DNA; mol_type = other DNA
gaatcagagttcaagacctac

SEQ ID NO: 34282 - DNA, 21 bp, synthetic construct
  source 1..21: mol_type = other DNA; mol_type = other DNA
tatgctagaaattcagataac

SEQ ID NO: 34283 - DNA, 21 bp, synthetic construct
  source 1..21: mol_type = other DNA; mol_type = other DNA
tatggcgtcggtacgtggagt

SEQ ID NO: 34284 - DNA, 21 bp, synthetic construct
  source 1..21: mol_type = other DNA; mol_type = other DNA
ggatttgaaactgtacgctgg

SEQ ID NO: 34285 - DNA, 21 bp, synthetic construct
  source 1..21: mol_type = other DNA; mol_type = other DNA
tattttagtggcagagaggag

SEQ ID NO: 34286 - DNA, 21 bp, synthetic construct
  source 1..21: mol_type = other DNA; mol_type = other DNA
aggggtgatagcagtcgctgg

SEQ ID NO: 34287 - DNA, 21 bp, synthetic construct
  source 1..21: mol_type = other DNA; mol_type = other DNA
tgcaaaaagggcagtttggaa

SEQ ID NO: 34288 - DNA, 21 bp, synthetic construct
  source 1..21: mol_type = other DNA; mol_type = other DNA
tggaccgagggaacgaagtat

SEQ ID NO: 34289 - DNA, 21 bp, synthetic construct
  source 1..21: mol_type = other DNA; mol_type = other DNA
tgtacaagtaaaagcggtcac

SEQ ID NO: 34290 - DNA, 21 bp, synthetic construct
  source 1..21: mol_type = other DNA; mol_type = other DNA
tacttccagggaacctacaac

SEQ ID NO: 34291 - DNA, 21 bp, synthetic construct
  source 1..21: mol_type = other DNA; mol_type = other DNA
agggaaggcaccagtttatgg

SEQ ID NO: 34292 - DNA, 21 bp, synthetic construct
  source 1..21: mol_type = other DNA; mol_type = other DNA
ccttggagcagtaatggcgta

SEQ ID NO: 34293 - DNA, 21 bp, synthetic construct
  source 1..21: mol_type = other DNA; mol_type = other DNA
cttgctaagaacggaatcaat

SEQ ID NO: 34294 - DNA, 21 bp, synthetic construct
  source 1..21: mol_type = other DNA; mol_type = other DNA
taccacaggcaaaaccccatg

SEQ ID NO: 34295 - DNA, 21 bp, synthetic construct
  source 1..21: mol_type = other DNA; mol_type = other DNA
tgtgggaaagcccatagctct

SEQ ID NO: 34296 - DNA, 21 bp, synthetic construct
  source 1..21: mol_type = other DNA; mol_type = other DNA
ttcttctcgggtaggatcgat

SEQ ID NO: 34297 - DNA, 21 bp, synthetic construct
  source 1..21: mol_type = other DNA; mol_type = other DNA
agttgtaagccttgcccgggg

SEQ ID NO: 34298 - DNA, 21 bp, synthetic construct
  source 1..21: mol_type = other DNA; mol_type = other DNA
tggttctcggggatccaggaa

SEQ ID NO: 34299 - DNA, 21 bp, synthetic construct
  source 1..21: mol_type = other DNA; mol_type = other DNA
tacagtcgactcgattatgat

SEQ ID NO: 34300 - DNA, 21 bp, synthetic construct
  source 1..21: mol_type = other DNA; mol_type = other DNA
tattaccatggggtcagagac

SEQ ID NO: 34301 - DNA, 21 bp, synthetic construct
  source 1..21: mol_type = other DNA; mol_type = other DNA
attgatgcggcgaataagtgc

SEQ ID NO: 34302 - DNA, 21 bp, synthetic construct
  source 1..21: mol_type = other DNA; mol_type = other DNA
tattggaacgggatacaggcc

SEQ ID NO: 34303 - DNA, 21 bp, synthetic construct
  source 1..21: mol_type = other DNA; mol_type = other DNA
tatagtaggttaagccctgag

SEQ ID NO: 34304 - DNA, 21 bp, synthetic construct
  source 1..21: mol_type = other DNA; mol_type = other DNA
agggaggatcacacctcgtgg

SEQ ID NO: 34305 - DNA, 21 bp, synthetic construct
  source 1..21: mol_type = other DNA; mol_type = other DNA
tgcaaaacgaaatctcaggat

SEQ ID NO: 34306 - DNA, 21 bp, synthetic construct
  source 1..21: mol_type = other DNA; mol_type = other DNA
gtcatgagcagccaaggatgg

SEQ ID NO: 34307 - DNA, 21 bp, synthetic construct
  source 1..21: mol_type = other DNA; mol_type = other DNA
tacagccgctcaggcggtaac

SEQ ID NO: 34308 - DNA, 21 bp, synthetic construct
  source 1..21: mol_type = other DNA; mol_type = other DNA
tacagtcgtgctaacttcaac

SEQ ID NO: 34309 - DNA, 21 bp, synthetic construct
  source 1..21: mol_type = other DNA; mol_type = other DNA
cagaagacgaacacagggtgc

SEQ ID NO: 34310 - DNA, 21 bp, synthetic construct
  source 1..21: mol_type = other DNA; mol_type = other DNA
tgtacgagcaagacgggtgag

SEQ ID NO: 34311 - DNA, 21 bp, synthetic construct
  source 1..21: mol_type = other DNA; mol_type = other DNA
gacatgacaagttccgtctgg

SEQ ID NO: 34312 - DNA, 21 bp, synthetic construct
  source 1..21: mol_type = other DNA; mol_type = other DNA
tattggagcgcggtcgtggct

SEQ ID NO: 34313 - DNA, 21 bp, synthetic construct
  source 1..21: mol_type = other DNA; mol_type = other DNA
gtaaaacgcagtgatgagtgt

SEQ ID NO: 34314 - DNA, 21 bp, synthetic construct
  source 1..21: mol_type = other DNA; mol_type = other DNA
agattaatggatagctacccc

SEQ ID NO: 34315 - DNA, 21 bp, synthetic construct
  source 1..21: mol_type = other DNA; mol_type = other DNA
aactggagcactaacggtgtt

SEQ ID NO: 34316 - DNA, 21 bp, synthetic construct
  source 1..21: mol_type = other DNA; mol_type = other DNA
tgtaaaagcagctgcaagccc

SEQ ID NO: 34317 - DNA, 21 bp, synthetic construct
  source 1..21: mol_type = other DNA; mol_type = other DNA
tactactcaggtgtaataatg

SEQ ID NO: 34318 - DNA, 21 bp, synthetic construct
  source 1..21: mol_type = other DNA; mol_type = other DNA
tactgggctggaaagtatgac

SEQ ID NO: 34319 - DNA, 21 bp, synthetic construct
  source 1..21: mol_type = other DNA; mol_type = other DNA
tgtcttaagatgtgcccaccc

SEQ ID NO: 34320 - DNA, 21 bp, synthetic construct
  source 1..21: mol_type = other DNA; mol_type = other DNA
ttcttcaccggggttttggca

SEQ ID NO: 34321 - DNA, 21 bp, synthetic construct
  source 1..21: mol_type = other DNA; mol_type = other DNA
tgtaaggcgcagacgccgggg

SEQ ID NO: 34322 - DNA, 21 bp, synthetic construct
  source 1..21: mol_type = other DNA; mol_type = other DNA
tgcaaacccgactccagatgg

SEQ ID NO: 34323 - DNA, 21 bp, synthetic construct
  source 1..21: mol_type = other DNA; mol_type = other DNA
tcacgacctacttgcccggcc

SEQ ID NO: 34324 - DNA, 21 bp, synthetic construct
  source 1..21: mol_type = other DNA; mol_type = other DNA
tgccgaccacaagctggagcc

SEQ ID NO: 34325 - DNA, 21 bp, synthetic construct
  source 1..21: mol_type = other DNA; mol_type = other DNA
tactcaagacaaggtgggaat

SEQ ID NO: 34326 - DNA, 21 bp, synthetic construct
  source 1..21: mol_type = other DNA; mol_type = other DNA
tgcactagcaaacaagggcac

SEQ ID NO: 34327 - DNA, 21 bp, synthetic construct
  source 1..21: mol_type = other DNA; mol_type = other DNA
tgtaaaccgatgactatagat

SEQ ID NO: 34328 - DNA, 21 bp, synthetic construct
  source 1..21: mol_type = other DNA; mol_type = other DNA
cgtgatcaattttcgacgtac

SEQ ID NO: 34329 - DNA, 21 bp, synthetic construct
  source 1..21: mol_type = other DNA; mol_type = other DNA
tacggtaaccagagggagtgt

SEQ ID NO: 34330 - DNA, 21 bp, synthetic construct
  source 1..21: mol_type = other DNA; mol_type = other DNA
cgtgacggatcatgtaaagca

SEQ ID NO: 34331 - DNA, 21 bp, synthetic construct
  source 1..21: mol_type = other DNA; mol_type = other DNA
aaagacgactaccaaacttgg

SEQ ID NO: 34332 - DNA, 21 bp, synthetic construct
  source 1..21: mol_type = other DNA; mol_type = other DNA
tgcatgtctaagactggtcat

SEQ ID NO: 34333 - DNA, 21 bp, synthetic construct
  source 1..21: mol_type = other DNA; mol_type = other DNA
gtggatagcacgtgtcacgcc

SEQ ID NO: 34334 - DNA, 21 bp, synthetic construct
  source 1..21: mol_type = other DNA; mol_type = other DNA
tactttcaggggattcatgaa

SEQ ID NO: 34335 - DNA, 21 bp, synthetic construct
  source 1..21: mol_type = other DNA; mol_type = other DNA
ggcaaagataaagcggattgt

SEQ ID NO: 34336 - DNA, 21 bp, synthetic construct
  source 1..21: mol_type = other DNA; mol_type = other DNA
tattttgcaggagtaatgaac

SEQ ID NO: 34337 - DNA, 21 bp, synthetic construct
  source 1..21: mol_type = other DNA; mol_type = other DNA
tttttccacggaaaggttgaa

SEQ ID NO: 34338 - DNA, 21 bp, synthetic construct
  source 1..21: mol_type = other DNA; mol_type = other DNA
caatcaggaaagaatgagtgc

SEQ ID NO: 34339 - DNA, 21 bp, synthetic construct
  source 1..21: mol_type = other DNA; mol_type = other DNA
ggtggctcgacctcgagttgg

SEQ ID NO: 34340 - DNA, 21 bp, synthetic construct
  source 1..21: mol_type = other DNA; mol_type = other DNA
aatgccaaaaacgaagggtgc

SEQ ID NO: 34341 - DNA, 21 bp, synthetic construct
  source 1..21: mol_type = other DNA; mol_type = other DNA
tgtaaacccatctgtgccggc

SEQ ID NO: 34342 - DNA, 21 bp, synthetic construct
  source 1..21: mol_type = other DNA; mol_type = other DNA
atacagtcgtcaaatggagtg

SEQ ID NO: 34343 - DNA, 21 bp, synthetic construct
  source 1..21: mol_type = other DNA; mol_type = other DNA
gtaccagattacgtcgcgtat

SEQ ID NO: 34344 - DNA, 21 bp, synthetic construct
  source 1..21: mol_type = other DNA; mol_type = other DNA
ataccagaagtgtgttgcggc

SEQ ID NO: 34345 - DNA, 21 bp, synthetic construct
  source 1..21: mol_type = other DNA; mol_type = other DNA
ctagctaaagctggttgcaac

SEQ ID NO: 34346 - DNA, 21 bp, synthetic construct
  source 1..21: mol_type = other DNA; mol_type = other DNA
cgaggcgaattttgtggaggg

SEQ ID NO: 34347 - DNA, 21 bp, synthetic construct
  source 1..21: mol_type = other DNA; mol_type = other DNA
tgtacaggtaatagctccaaa

SEQ ID NO: 34348 - DNA, 21 bp, synthetic construct
  source 1..21: mol_type = other DNA; mol_type = other DNA
tacagtaagtcgggcgaaaat

SEQ ID NO: 34349 - DNA, 21 bp, synthetic construct
  source 1..21: mol_type = other DNA; mol_type = other DNA
acatgggacggtttgatacct

SEQ ID NO: 34350 - DNA, 21 bp, synthetic construct
  source 1..21: mol_type = other DNA; mol_type = other DNA
agcatggattctcgatcatgg

SEQ ID NO: 34351 - DNA, 21 bp, synthetic construct
  source 1..21: mol_type = other DNA; mol_type = other DNA
caagatggaagttcatcctgg

SEQ ID NO: 34352 - DNA, 21 bp, synthetic construct
  source 1..21: mol_type = other DNA; mol_type = other DNA
tatagtcggcttggaggcgat

SEQ ID NO: 34353 - DNA, 21 bp, synthetic construct
  source 1..21: mol_type = other DNA; mol_type = other DNA
tattcgcgacaaggtaacaat

SEQ ID NO: 34354 - DNA, 21 bp, synthetic construct
  source 1..21: mol_type = other DNA; mol_type = other DNA
atcaaggaccaaagtgggtgc

SEQ ID NO: 34355 - DNA, 21 bp, synthetic construct
  source 1..21: mol_type = other DNA; mol_type = other DNA
cagcaaccaaaagaaacctgt

SEQ ID NO: 34356 - DNA, 21 bp, synthetic construct
  source 1..21: mol_type = other DNA; mol_type = other DNA
tatgtgaaagtgtgtaaggat

SEQ ID NO: 34357 - DNA, 21 bp, synthetic construct
  source 1..21: mol_type = other DNA; mol_type = other DNA
tgcatgccgcaggctggacgc

SEQ ID NO: 34358 - DNA, 21 bp, synthetic construct
  source 1..21: mol_type = other DNA; mol_type = other DNA
tacacgaagttagacatgaac

SEQ ID NO: 34359 - DNA, 21 bp, synthetic construct
  source 1..21: mol_type = other DNA; mol_type = other DNA
tgtaaaccaaccagcctcaac

SEQ ID NO: 34360 - DNA, 21 bp, synthetic construct
  source 1..21: mol_type = other DNA; mol_type = other DNA
tatttcgcgggaaagatggcg

SEQ ID NO: 34361 - DNA, 21 bp, synthetic construct
  source 1..21: mol_type = other DNA; mol_type = other DNA
ggggggcctactatgtgttac

SEQ ID NO: 34362 - DNA, 21 bp, synthetic construct
  source 1..21: mol_type = other DNA; mol_type = other DNA
ggatgtggcactaagatgggc

SEQ ID NO: 34363 - DNA, 21 bp, synthetic construct
  source 1..21: mol_type = other DNA; mol_type = other DNA
tgtaagcccccaatgggtgca

SEQ ID NO: 34364 - DNA, 21 bp, synthetic construct
  source 1..21: mol_type = other DNA; mol_type = other DNA
tacgcaaggatgggccataat

SEQ ID NO: 34365 - DNA, 21 bp, synthetic construct
  source 1..21: mol_type = other DNA; mol_type = other DNA
tggttcacaggggtaaaggaa

SEQ ID NO: 34366 - DNA, 21 bp, synthetic construct
  source 1..21: mol_type = other DNA; mol_type = other DNA
ttgtctaagaacaactataat

SEQ ID NO: 34367 - DNA, 21 bp, synthetic construct
  source 1..21: mol_type = other DNA; mol_type = other DNA
tattctaagatgggtgagaat

SEQ ID NO: 34368 - DNA, 21 bp, synthetic construct
  source 1..21: mol_type = other DNA; mol_type = other DNA
tgcaaagctctcagtagagag

SEQ ID NO: 34369 - DNA, 21 bp, synthetic construct
  source 1..21: mol_type = other DNA; mol_type = other DNA
ggaggaggatcttccctatgg

SEQ ID NO: 34370 - DNA, 21 bp, synthetic construct
  source 1..21: mol_type = other DNA; mol_type = other DNA
tactctagaattacgcctaat

SEQ ID NO: 34371 - DNA, 21 bp, synthetic construct
  source 1..21: mol_type = other DNA; mol_type = other DNA
gggaatgcgacgtctcattgg

SEQ ID NO: 34372 - DNA, 21 bp, synthetic construct
  source 1..21: mol_type = other DNA; mol_type = other DNA
tgcaagccgaggtctgctgag

SEQ ID NO: 34373 - DNA, 21 bp, synthetic construct
  source 1..21: mol_type = other DNA; mol_type = other DNA
ttgtggaaagagtgcaaacca

SEQ ID NO: 34374 - DNA, 21 bp, synthetic construct
  source 1..21: mol_type = other DNA; mol_type = other DNA
tatactcccggttgcaaggaa

SEQ ID NO: 34375 - DNA, 21 bp, synthetic construct
  source 1..21: mol_type = other DNA; mol_type = other DNA
tatgtaaagtcacaacccgtc

SEQ ID NO: 34376 - DNA, 21 bp, synthetic construct
  source 1..21: mol_type = other DNA; mol_type = other DNA
tattgggggggcattactgaa

SEQ ID NO: 34377 - DNA, 21 bp, synthetic construct
  source 1..21: mol_type = other DNA; mol_type = other DNA
tgcaaacctggagctggcgaa

SEQ ID NO: 34378 - DNA, 21 bp, synthetic construct
  source 1..21: mol_type = other DNA; mol_type = other DNA
taccacagaagttcctcaaac

SEQ ID NO: 34379 - DNA, 21 bp, synthetic construct
  source 1..21: mol_type = other DNA; mol_type = other DNA
tattacacgggggttatgtct

SEQ ID NO: 34380 - DNA, 21 bp, synthetic construct
  source 1..21: mol_type = other DNA; mol_type = other DNA
tgcggcgaggccatccttatg

SEQ ID NO: 34381 - DNA, 21 bp, synthetic construct
  source 1..21: mol_type = other DNA; mol_type = other DNA
agaagcgacttcataccgttc

SEQ ID NO: 34382 - DNA, 21 bp, synthetic construct
  source 1..21: mol_type = other DNA; mol_type = other DNA
ttttcacgtgcggggcagaat

SEQ ID NO: 34383 - DNA, 21 bp, synthetic construct
  source 1..21: mol_type = other DNA; mol_type = other DNA
ataatgggcgaccgaacctgg

SEQ ID NO: 34384 - DNA, 21 bp, synthetic construct
  source 1..21: mol_type = other DNA; mol_type = other DNA
gtcgcctcaatgggaatcggt

SEQ ID NO: 34385 - DNA, 21 bp, synthetic construct
  source 1..21: mol_type = other DNA; mol_type = other DNA
ccaaagggtccatgcgatgcc

SEQ ID NO: 34386 - DNA, 21 bp, synthetic construct
  source 1..21: mol_type = other DNA; mol_type = other DNA
tttcgttctactaacggagtt

SEQ ID NO: 34387 - DNA, 21 bp, synthetic construct
  source 1..21: mol_type = other DNA; mol_type = other DNA
tgtccaccgaagaaaacggat

SEQ ID NO: 34388 - DNA, 21 bp, synthetic construct
  source 1..21: mol_type = other DNA; mol_type = other DNA
tggtttagtggccaaagagag

SEQ ID NO: 34389 - DNA, 21 bp, synthetic construct
  source 1..21: mol_type = other DNA; mol_type = other DNA
tgcaagagcggccaaggggcg

SEQ ID NO: 34390 - DNA, 21 bp, synthetic construct
  source 1..21: mol_type = other DNA; mol_type = other DNA
tgcaaaccgggcactgtcatg

SEQ ID NO: 34391 - DNA, 21 bp, synthetic construct
  source 1..21: mol_type = other DNA; mol_type = other DNA
tatagtaggggtaacaccaat

SEQ ID NO: 34392 - DNA, 21 bp, synthetic construct
  source 1..21: mol_type = other DNA; mol_type = other DNA
gtgaatgatttcaagatcttt

SEQ ID NO: 34393 - DNA, 21 bp, synthetic construct
  source 1..21: mol_type = other DNA; mol_type = other DNA
ctggctaaaaacggatgtaac

SEQ ID NO: 34394 - DNA, 21 bp, synthetic construct
  source 1..21: mol_type = other DNA; mol_type = other DNA
tgtaaaacgttcagcaaggag

SEQ ID NO: 34395 - DNA, 21 bp, synthetic construct
  source 1..21: mol_type = other DNA; mol_type = other DNA
gccctacctccaaaatgcagt

SEQ ID NO: 34396 - DNA, 21 bp, synthetic construct
  source 1..21: mol_type = other DNA; mol_type = other DNA
tgcaaaaaaaacggaatggag

SEQ ID NO: 34397 - DNA, 21 bp, synthetic construct
  source 1..21: mol_type = other DNA
ttaccgagaccttgcagtgag

SEQ ID NO: 34398 - DNA, 21 bp, synthetic construct
  source 1..21: mol_type = other DNA
gcccattgcaagggcccggaa

SEQ ID NO: 34399 - DNA, 21 bp, synthetic construct
  source 1..21: mol_type = other DNA; mol_type = other DNA
cgcgaaccgacctgcccgaga

SEQ ID NO: 34400 - DNA, 21 bp, synthetic construct
  source 1..21: mol_type = other DNA; mol_type = other DNA
tacaacagcacgcatgggcgt

SEQ ID NO: 34401 - DNA, 21 bp, synthetic construct
  source 1..21: mol_type = other DNA; mol_type = other DNA
tacatgcccgggtgtaaggaa

SEQ ID NO: 34402 - DNA, 21 bp, synthetic construct
  source 1..21: mol_type = other DNA; mol_type = other DNA
taccatgctctcaacaaaccc

SEQ ID NO: 34403 - DNA, 21 bp, synthetic construct
  source 1..21: mol_type = other DNA; mol_type = other DNA
tacttcagcggatatcccgac

SEQ ID NO: 34404 - DNA, 21 bp, synthetic construct
  source 1..21: mol_type = other DNA; mol_type = other DNA
ttcagcaaagttggaaataat

SEQ ID NO: 34405 - DNA, 21 bp, synthetic construct
  source 1..21: mol_type = other DNA
tatttcacagcacgggtcgaa

SEQ ID NO: 34406 - DNA, 21 bp, synthetic construct
  source 1..21: mol_type = other DNA
gttccagaaaaatgtcccggt

SEQ ID NO: 34407 - DNA, 21 bp, synthetic construct
  source 1..21: mol_type = other DNA
tatgcaaaacaaggcttgaac

SEQ ID NO: 34408 - DNA, 21 bp, synthetic construct
  source 1..21: mol_type = other DNA
ctatctaagaacgggcccaac

SEQ ID NO: 34409 - DNA, 21 bp, synthetic construct
  source 1..21: mol_type = other DNA
aaggacgactacacaagcttt

SEQ ID NO: 34410 - DNA, 21 bp, synthetic construct
  source 1..21: mol_type = other DNA
ctctcggatttcaaaatatac

SEQ ID NO: 34411 - DNA, 21 bp, synthetic construct
  source 1..21: mol_type = other DNA
taccagtcaacaaacggtata

SEQ ID NO: 34412 - DNA, 21 bp, synthetic construct
  source 1..21: mol_type = other DNA
ggcgaacctggagtccgctgg

SEQ ID NO: 34413 - DNA, 21 bp, synthetic construct
  source 1..21: mol_type = other DNA
tacgcacgtggaaatactaac

SEQ ID NO: 34414 - DNA, 21 bp, synthetic construct
  source 1..21: mol_type = other DNA
tgcaaggttattagcccgccg

SEQ ID NO: 34415 - DNA, 21 bp, synthetic construct
  source 1..21: mol_type = other DNA
tggtattcagggattatcgct

SEQ ID NO: 34416 - DNA, 21 bp, synthetic construct
  source 1..21: mol_type = other DNA
cgagaagatcatactagctgg

SEQ ID NO: 34417 - DNA, 21 bp, synthetic construct
  source 1..21: mol_type = other DNA
tatagcaaatggaactcaaat

SEQ ID NO: 34418 - DNA, 21 bp, synthetic construct
  source 1..21: mol_type = other DNA
tgcaaacctccaaagctagaa

SEQ ID NO: 34419 - DNA, 21 bp, synthetic construct
  source 1..21: mol_type = other DNA
tacagtaagaacaatattaat

SEQ ID NO: 34420 - DNA, 21 bp, synthetic construct
  source 1..21: mol_type = other DNA
cggttggaaagctcattgtgg

SEQ ID NO: 34421 - DNA, 21 bp, synthetic construct
  source 1..21: mol_type = other DNA
tattccaagaacggccacaac

SEQ ID NO: 34422 - DNA, 21 bp, synthetic construct
  source 1..21: mol_type = other DNA
cgtactccaacgtgcgccgca

SEQ ID NO: 34423 - DNA, 21 bp, synthetic construct
  source 1..21: mol_type = other DNA
tatttcagtggcactataact

SEQ ID NO: 34424 - DNA, 21 bp, synthetic construct
  source 1..21: mol_type = other DNA; mol_type = other DNA
ttatgggacgggacggaagcc

SEQ ID NO: 34425 - DNA, 21 bp, synthetic construct
  source 1..21: mol_type = other DNA; mol_type = other DNA
cacccagaaactaagtgtccg

SEQ ID NO: 34426 - DNA, 21 bp, synthetic construct
  source 1..21: mol_type = other DNA; mol_type = other DNA
cgtccagaaagcgtacgttgg

SEQ ID NO: 34427 - DNA, 21 bp, synthetic construct
  source 1..21: mol_type = other DNA; mol_type = other DNA
tacgttcgttcagactcaacg

SEQ ID NO: 34428 - DNA, 21 bp, synthetic construct
  source 1..21: mol_type = other DNA; mol_type = other DNA
tgtatatctaaaactggtcac

SEQ ID NO: 34429 - DNA, 21 bp, synthetic construct
  source 1..21: mol_type = other DNA; mol_type = other DNA
ggttgcggaactaaaaatggg

SEQ ID NO: 34430 - DNA, 21 bp, synthetic construct
  source 1..21: mol_type = other DNA; mol_type = other DNA
atctcggagtttaaaatttac

SEQ ID NO: 34431 - DNA, 21 bp, synthetic construct
  source 1..21: mol_type = other DNA; mol_type = other DNA
tactcacgtcagaacagtaac

SEQ ID NO: 34432 - DNA, 21 bp, synthetic construct
  source 1..21: mol_type = other DNA; mol_type = other DNA
cgaggcgatgggaattactgg

SEQ ID NO: 34433 - DNA, 21 bp, synthetic construct
  source 1..21: mol_type = other DNA; mol_type = other DNA
tacgcccgccagggagacaat

SEQ ID NO: 34434 - DNA, 21 bp, synthetic construct
  source 1..21: mol_type = other DNA; mol_type = other DNA
tggtggcatggaaggcccgaa

SEQ ID NO: 34435 - DNA, 21 bp, synthetic construct
  source 1..21: mol_type = other DNA; mol_type = other DNA
tatagccgtcatgggagcaat

SEQ ID NO: 34436 - DNA, 21 bp, synthetic construct
  source 1..21: mol_type = other DNA; mol_type = other DNA
tatcacgcccttaataagcca

SEQ ID NO: 34437 - DNA, 21 bp, synthetic construct
  source 1..21: mol_type = other DNA; mol_type = other DNA
ttatggacaggggagaacgca

SEQ ID NO: 34438 - DNA, 21 bp, synthetic construct
  source 1..21: mol_type = other DNA; mol_type = other DNA
cgggatgacttcatctccttc

SEQ ID NO: 34439 - DNA, 21 bp, synthetic construct
  source 1..21: mol_type = other DNA; mol_type = other DNA
gacttgcagtcgtcgaactgg

SEQ ID NO: 34440 - DNA, 21 bp, synthetic construct
  source 1..21: mol_type = other DNA; mol_type = other DNA
tactcccgcatgaactataac

SEQ ID NO: 34441 - DNA, 21 bp, synthetic construct
  source 1..21: mol_type = other DNA; mol_type = other DNA
gttatatcgagcaacggagtt

SEQ ID NO: 34442 - DNA, 21 bp, synthetic construct
  source 1..21: mol_type = other DNA; mol_type = other DNA
gtgagtactcatatttgtgcg

SEQ ID NO: 34443 - DNA, 21 bp, synthetic construct
  source 1..21: mol_type = other DNA; mol_type = other DNA
tgtaaggcagtctcgagggac

SEQ ID NO: 34444 - DNA, 21 bp, synthetic construct
  source 1..21: mol_type = other DNA; mol_type = other DNA
tgcaggcctgaagcaaaaagc

SEQ ID NO: 34445 - DNA, 21 bp, synthetic construct
  source 1..21: mol_type = other DNA; mol_type = other DNA
ggaagcgactttgtgcgatgg

SEQ ID NO: 34446 - DNA, 21 bp, synthetic construct
  source 1..21: mol_type = other DNA; mol_type = other DNA
tatggcaaagttggctgccag

SEQ ID NO: 34447 - DNA, 21 bp, synthetic construct
  source 1..21: mol_type = other DNA; mol_type = other DNA
tgtaaaaaacagctccaagat

SEQ ID NO: 34448 - DNA, 21 bp, synthetic construct
  source 1..21: mol_type = other DNA; mol_type = other DNA
tgcaaaccaggcaccctcgat

SEQ ID NO: 34449 - DNA, 21 bp, synthetic construct
  source 1..21: mol_type = other DNA; mol_type = other DNA
tgtaaacccagaagcggggaa

SEQ ID NO: 34450 - DNA, 21 bp, synthetic construct
  source 1..21: mol_type = other DNA; mol_type = other DNA
tgtaaacctgggatgggcagc

SEQ ID NO: 34451 - DNA, 21 bp, synthetic construct
  source 1..21: mol_type = other DNA; mol_type = other DNA
aaagatggctacagcatgtat

SEQ ID NO: 34452 - DNA, 21 bp, synthetic construct
  source 1..21: mol_type = other DNA; mol_type = other DNA
aaaccggatcacgtaagatgg

SEQ ID NO: 34453 - DNA, 21 bp, synthetic construct
  source 1..21: mol_type = other DNA; mol_type = other DNA
tgtcgtgctcagacgctcgat

SEQ ID NO: 34454 - DNA, 21 bp, synthetic construct
  source 1..21: mol_type = other DNA; mol_type = other DNA
acccatagtagcaatggtgtc

SEQ ID NO: 34455 - DNA, 21 bp, synthetic construct
  source 1..21: mol_type = other DNA; mol_type = other DNA
tactcgcgactctctcccgaa

SEQ ID NO: 34456 - DNA, 21 bp, synthetic construct
  source 1..21: mol_type = other DNA; mol_type = other DNA
tgcacctcaaagaccgggccg

SEQ ID NO: 34457 - DNA, 21 bp, synthetic construct
  source 1..21: mol_type = other DNA; mol_type = other DNA
agaacgtatacggagtttcct

SEQ ID NO: 34458 - DNA, 21 bp, synthetic construct
  source 1..21: mol_type = other DNA; mol_type = other DNA
tattttcaaggggtcattgca

SEQ ID NO: 34459 - DNA, 21 bp, synthetic construct
  source 1..21: mol_type = other DNA; mol_type = other DNA
tatagtaaagcacagggtgta

SEQ ID NO: 34460 - DNA, 21 bp, synthetic construct
  source 1..21: mol_type = other DNA; mol_type = other DNA
gggatggagcctgtccggtgg

SEQ ID NO: 34461 - DNA, 21 bp, synthetic construct
  source 1..21: mol_type = other DNA; mol_type = other DNA
gactacgcctactcacgggag

SEQ ID NO: 34462 - DNA, 21 bp, synthetic construct
  source 1..21: mol_type = other DNA; mol_type = other DNA
tggatctcgacgaatggcgta

SEQ ID NO: 34463 - DNA, 21 bp, synthetic construct
  source 1..21: mol_type = other DNA; mol_type = other DNA
tatgaacccccgtgcaaggaa

SEQ ID NO: 34464 - DNA, 21 bp, synthetic construct
  source 1..21: mol_type = other DNA; mol_type = other DNA
tattttcaagggattccgtta

SEQ ID NO: 34465 - DNA, 21 bp, synthetic construct
  source 1..21: mol_type = other DNA; mol_type = other DNA
tactttcaaggagtgcgggat

SEQ ID NO: 34466 - DNA, 21 bp, synthetic construct
  source 1..21: mol_type = other DNA; mol_type = other DNA
tgtaaaccgggtagccctttg

SEQ ID NO: 34467 - DNA, 21 bp, synthetic construct
  source 1..21: mol_type = other DNA; mol_type = other DNA
tatatgagtacaaacggagtg

SEQ ID NO: 34468 - DNA, 21 bp, synthetic construct
  source 1..21: mol_type = other DNA; mol_type = other DNA
tgtaacaaaacctctgtcaca

SEQ ID NO: 34469 - DNA, 21 bp, synthetic construct
  source 1..21: mol_type = other DNA; mol_type = other DNA
tgtacaccggattacagagag

SEQ ID NO: 34470 - DNA, 21 bp, synthetic construct
  source 1..21: mol_type = other DNA; mol_type = other DNA
ttcgccagaacaggtcagaat

SEQ ID NO: 34471 - DNA, 21 bp, synthetic construct
  source 1..21: mol_type = other DNA; mol_type = other DNA
tactctaagaatggcatgaat

SEQ ID NO: 34472 - DNA, 21 bp, synthetic construct
  source 1..21: mol_type = other DNA; mol_type = other DNA
agatcggaatatacggtgtat

SEQ ID NO: 34473 - DNA, 21 bp, synthetic construct
  source 1..21: mol_type = other DNA; mol_type = other DNA
tggttctctggcataactgaa

SEQ ID NO: 34474 - DNA, 21 bp, synthetic construct
  source 1..21: mol_type = other DNA; mol_type = other DNA
tattggtcgagtgtgaaggac

SEQ ID NO: 34475 - DNA, 21 bp, synthetic construct
  source 1..21: mol_type = other DNA; mol_type = other DNA
tatcatagcaccaacgggatt

SEQ ID NO: 34476 - DNA, 21 bp, synthetic construct
  source 1..21: mol_type = other DNA; mol_type = other DNA
tgcaaaggcggcggggctggt

SEQ ID NO: 34477 - DNA, 21 bp, synthetic construct
  source 1..21: mol_type = other DNA; mol_type = other DNA
gacggaggcacaagtaggtat

SEQ ID NO: 34478 - DNA, 21 bp, synthetic construct
  source 1..21: mol_type = other DNA; mol_type = other DNA
tttttttcaggaacccatgag

SEQ ID NO: 34479 - DNA, 21 bp, synthetic construct
  source 1..21: mol_type = other DNA; mol_type = other DNA
aagaatgaatacgtgaaatgg

SEQ ID NO: 34480 - DNA, 21 bp, synthetic construct
  source 1..21: mol_type = other DNA; mol_type = other DNA
agaaacgacttcgtcagttgg

SEQ ID NO: 34481 - DNA, 21 bp, synthetic construct
  source 1..21: mol_type = other DNA; mol_type = other DNA
tgcaaacccgacaaaccgtta

SEQ ID NO: 34482 - DNA, 21 bp, synthetic construct
  source 1..21: mol_type = other DNA; mol_type = other DNA
ttctacagcggagtaaaggaa

SEQ ID NO: 34483 - DNA, 21 bp, synthetic construct
  source 1..21: mol_type = other DNA; mol_type = other DNA
tgcaataagccaatggtcgcg

SEQ ID NO: 34484 - DNA, 21 bp, synthetic construct
  source 1..21: mol_type = other DNA; mol_type = other DNA
ttctggagcggaactatcgat

SEQ ID NO: 34485 - DNA, 21 bp, synthetic construct
  source 1..21: mol_type = other DNA; mol_type = other DNA
tacgccaaagggaatatgaac

SEQ ID NO: 34486 - DNA, 21 bp, synthetic construct
  source 1..21: mol_type = other DNA; mol_type = other DNA
tacttcgcaggggttacagcc

SEQ ID NO: 34487 - DNA, 21 bp, synthetic construct
  source 1..21: mol_type = other DNA; mol_type = other DNA
gatcgcaagccctgtcctgcg

SEQ ID NO: 34488 - DNA, 21 bp, synthetic construct
  source 1..21: mol_type = other DNA; mol_type = other DNA
tgtaaaatggataacactcct

SEQ ID NO: 34489 - DNA, 21 bp, synthetic construct
  source 1..21: mol_type = other DNA; mol_type = other DNA
tacaaagaaccatgtatctca

SEQ ID NO: 34490 - DNA, 21 bp, synthetic construct
  source 1..21: mol_type = other DNA; mol_type = other DNA
tatgcccgggggggtgtaaac

SEQ ID NO: 34491 - DNA, 21 bp, synthetic construct
  source 1..21: mol_type = other DNA; mol_type = other DNA
cgctcagattttatccccttc

SEQ ID NO: 34492 - DNA, 21 bp, synthetic construct
  source 1..21: mol_type = other DNA; mol_type = other DNA
ccatggtcatcgaacggggtg

SEQ ID NO: 34493 - DNA, 21 bp, synthetic construct
  source 1..21: mol_type = other DNA; mol_type = other DNA
tatttttctggtacccaaaga

SEQ ID NO: 34494 - DNA, 21 bp, synthetic construct
  source 1..21: mol_type = other DNA; mol_type = other DNA
tatgcccgagggggacagaat

SEQ ID NO: 34495 - DNA, 21 bp, synthetic construct
  source 1..21: mol_type = other DNA; mol_type = other DNA
ttgtgccgtccgatgagcgag

SEQ ID NO: 34496 - DNA, 21 bp, synthetic construct
  source 1..21: mol_type = other DNA; mol_type = other DNA
tattctcggagcaacatgaat

SEQ ID NO: 34497 - DNA, 21 bp, synthetic construct
  source 1..21: mol_type = other DNA; mol_type = other DNA
ggcagtgagtttagtacctat

SEQ ID NO: 34498 - DNA, 21 bp, synthetic construct
  source 1..21: mol_type = other DNA; mol_type = other DNA
caggattcaactaatgggcgc

SEQ ID NO: 34499 - DNA, 21 bp, synthetic construct
  source 1..21: mol_type = other DNA; mol_type = other DNA
tattggacgggcatgccggaa

SEQ ID NO: 34500 - DNA, 21 bp, synthetic construct
  source 1..21: mol_type = other DNA; mol_type = other DNA
ggaccagaaggggtgcgttgg

SEQ ID NO: 34501 - DNA, 21 bp, synthetic construct
  source 1..21: mol_type = other DNA; mol_type = other DNA
cgtacgcccaccttatatcct

SEQ ID NO: 34502 - DNA, 21 bp, synthetic construct
  source 1..21: mol_type = other DNA; mol_type = other DNA
tttggaaaaggagaatgggct

SEQ ID NO: 34503 - DNA, 21 bp, synthetic construct
  source 1..21: mol_type = other DNA; mol_type = other DNA
tactttacaggatcgatggat

SEQ ID NO: 34504 - DNA, 21 bp, synthetic construct
  source 1..21: mol_type = other DNA; mol_type = other DNA
tacttcactgggatgcaatcg

SEQ ID NO: 34505 - DNA, 21 bp, synthetic construct
  source 1..21: mol_type = other DNA; mol_type = other DNA
tatagtcgccagaattttaac

SEQ ID NO: 34506 - DNA, 21 bp, synthetic construct
  source 1..21: mol_type = other DNA; mol_type = other DNA
tggttctcgggacagcgtgaa

SEQ ID NO: 34507 - DNA, 21 bp, synthetic construct
  source 1..21: mol_type = other DNA; mol_type = other DNA
cgaatgttggatgtgtttccc

SEQ ID NO: 34508 - DNA, 21 bp, synthetic construct
  source 1..21: mol_type = other DNA; mol_type = other DNA
tatgagccgggttgcaaacaa

SEQ ID NO: 34509 - DNA, 21 bp, synthetic construct
  source 1..21: mol_type = other DNA; mol_type = other DNA
aaagacgattataagacctgg

SEQ ID NO: 34510 - DNA, 21 bp, synthetic construct
  source 1..21: mol_type = other DNA; mol_type = other DNA
accagtgattacgagagctat

SEQ ID NO: 34511 - DNA, 21 bp, synthetic construct
  source 1..21: mol_type = other DNA; mol_type = other DNA
ctgcaccgggagagccccaac

SEQ ID NO: 34512 - DNA, 21 bp, synthetic construct
  source 1..21: mol_type = other DNA; mol_type = other DNA
tacagcagggctaatcacaac

SEQ ID NO: 34513 - DNA, 21 bp, synthetic construct
  source 1..21: mol_type = other DNA; mol_type = other DNA
ttttttagcggtcaacatgaa

SEQ ID NO: 34514 - DNA, 21 bp, synthetic construct
  source 1..21: mol_type = other DNA; mol_type = other DNA
tacttttcaggaatgcctgac

SEQ ID NO: 34515 - DNA, 21 bp, synthetic construct
  source 1..21: mol_type = other DNA; mol_type = other DNA
cagcgatatgatgcctacgag

SEQ ID NO: 34516 - DNA, 21 bp, synthetic construct
  source 1..21: mol_type = other DNA; mol_type = other DNA
ttctttactggcaaagttagc

SEQ ID NO: 34517 - DNA, 21 bp, synthetic construct
  source 1..21: mol_type = other DNA; mol_type = other DNA
aatatgtcagaggcgaagtgg

SEQ ID NO: 34518 - DNA, 21 bp, synthetic construct
  source 1..21: mol_type = other DNA; mol_type = other DNA
caaaccaaatccgaacagtgc

SEQ ID NO: 34519 - DNA, 21 bp, synthetic construct
  source 1..21: mol_type = other DNA; mol_type = other DNA
ttcagccgcgcagggactaac

SEQ ID NO: 34520 - DNA, 21 bp, synthetic construct
  source 1..21: mol_type = other DNA; mol_type = other DNA
tatgtttactctgacagtagg

SEQ ID NO: 34521 - DNA, 21 bp, synthetic construct
  source 1..21: mol_type = other DNA; mol_type = other DNA
tatagctacgcgggagggggt

SEQ ID NO: 34522 - DNA, 21 bp, synthetic construct
  source 1..21: mol_type = other DNA; mol_type = other DNA
tatgcccggaccagtggtaac

SEQ ID NO: 34523 - DNA, 21 bp, synthetic construct
  source 1..21: mol_type = other DNA; mol_type = other DNA
agagagccaacttgtccccgc

SEQ ID NO: 34524 - DNA, 21 bp, synthetic construct
  source 1..21: mol_type = other DNA; mol_type = other DNA
agcatgggtgaccggagttgg

SEQ ID NO: 34525 - DNA, 21 bp, synthetic construct
  source 1..21: mol_type = other DNA; mol_type = other DNA
cgtgaatacgatagcttccca

SEQ ID NO: 34526 - DNA, 21 bp, synthetic construct
  source 1..21: mol_type = other DNA; mol_type = other DNA
cgcctggaggcaagcgtatgg

SEQ ID NO: 34527 - DNA, 21 bp, synthetic construct
  source 1..21: mol_type = other DNA; mol_type = other DNA
cgtaacgattacaactacccg

SEQ ID NO: 34528 - DNA, 21 bp, synthetic construct
  source 1..21: mol_type = other DNA; mol_type = other DNA
cgcatggaagttggagactgg

SEQ ID NO: 34529 - DNA, 21 bp, synthetic construct
  source 1..21: mol_type = other DNA; mol_type = other DNA
ttcagtaagctgaatccagat

SEQ ID NO: 34530 - DNA, 21 bp, synthetic construct
  source 1..21: mol_type = other DNA; mol_type = other DNA
tgtaaaccgggggtccctccc

SEQ ID NO: 34531 - DNA, 21 bp, synthetic construct
  source 1..21: mol_type = other DNA; mol_type = other DNA
tatagcagaatcggcccgacg

SEQ ID NO: 34532 - DNA, 21 bp, synthetic construct
  source 1..21: mol_type = other DNA; mol_type = other DNA
agaaccgcgggcgtatttccg

SEQ ID NO: 34533 - DNA, 21 bp, synthetic construct
  source 1..21: mol_type = other DNA; mol_type = other DNA
taccacgccctaaataaacct

SEQ ID NO: 34534 - DNA, 21 bp, synthetic construct
  source 1..21: mol_type = other DNA; mol_type = other DNA
tacactaaagcgcaaatgaat

SEQ ID NO: 34535 - DNA, 21 bp, synthetic construct
  source 1..21: mol_type = other DNA; mol_type = other DNA
tgtgaaacgaagaaaccatca

SEQ ID NO: 34536 - DNA, 21 bp, synthetic construct
  source 1..21: mol_type = other DNA; mol_type = other DNA
tactataccggagtgacaaag

SEQ ID NO: 34537 - DNA, 21 bp, synthetic construct
  source 1..21: mol_type = other DNA; mol_type = other DNA
aattacgttaagagcacctgc

SEQ ID NO: 34538 - DNA, 21 bp, synthetic construct
  source 1..21: mol_type = other DNA; mol_type = other DNA
tttttttcaggccaaattgct

SEQ ID NO: 34539 - DNA, 21 bp, synthetic construct
  source 1..21: mol_type = other DNA; mol_type = other DNA
tggtggaccggtactttagaa

SEQ ID NO: 34540 - DNA, 21 bp, synthetic construct
  source 1..21: mol_type = other DNA; mol_type = other DNA
tatgtgagattcgactccggg

SEQ ID NO: 34541 - DNA, 21 bp, synthetic construct
  source 1..21: mol_type = other DNA; mol_type = other DNA
tgcgataagacatgttcccct

SEQ ID NO: 34542 - DNA, 21 bp, synthetic construct
  source 1..21: mol_type = other DNA; mol_type = other DNA
tattttatgggtatcccagct

SEQ ID NO: 34543 - DNA, 21 bp, synthetic construct
  source 1..21: mol_type = other DNA; mol_type = other DNA
tatagtcggaataacgtcaat

SEQ ID NO: 34544 - DNA, 21 bp, synthetic construct
  source 1..21: mol_type = other DNA; mol_type = other DNA
tactggtcaggcacgagtagc

SEQ ID NO: 34545 - DNA, 21 bp, synthetic construct
  source 1..21: mol_type = other DNA; mol_type = other DNA
tacgcaaggcagaatttaaac

SEQ ID NO: 34546 - DNA, 21 bp, synthetic construct
  source 1..21: mol_type = other DNA; mol_type = other DNA
tatgcgcgtttatcgatcaat

SEQ ID NO: 34547 - DNA, 21 bp, synthetic construct
  source 1..21: mol_type = other DNA; mol_type = other DNA
tgccgcgaggggacaagagca

SEQ ID NO: 34548 - DNA, 21 bp, synthetic construct
  source 1..21: mol_type = other DNA; mol_type = other DNA
gatcggcgcgggtgctgtgca

SEQ ID NO: 34549 - DNA, 21 bp, synthetic construct
  source 1..21: mol_type = other DNA; mol_type = other DNA
tactggagcgcgaagctggat

SEQ ID NO: 34550 - DNA, 21 bp, synthetic construct
  source 1..21: mol_type = other DNA; mol_type = other DNA
agggaagaatttactgcttgg

SEQ ID NO: 34551 - DNA, 21 bp, synthetic construct
  source 1..21: mol_type = other DNA; mol_type = other DNA
ttcagtcgcatgaatacgaac

SEQ ID NO: 34552 - DNA, 21 bp, synthetic construct
  source 1..21: mol_type = other DNA; mol_type = other DNA
ggttgtgttgtgaaacccgaa

SEQ ID NO: 34553 - DNA, 21 bp, synthetic construct
  source 1..21: mol_type = other DNA; mol_type = other DNA
acccggtgtgtgggcgagata

SEQ ID NO: 34554 - DNA, 21 bp, synthetic construct
  source 1..21: mol_type = other DNA; mol_type = other DNA
tgctcgaaaccaacaccctcg

SEQ ID NO: 34555 - DNA, 21 bp, synthetic construct
  source 1..21: mol_type = other DNA; mol_type = other DNA
tgtggcggtataaagccgcct

SEQ ID NO: 34556 - DNA, 21 bp, synthetic construct
  source 1..21: mol_type = other DNA; mol_type = other DNA
ggccatgggaccaagtgtggc

SEQ ID NO: 34557 - DNA, 21 bp, synthetic construct
  source 1..21: mol_type = other DNA; mol_type = other DNA
tgtaaaatggacggcacgggt

SEQ ID NO: 34558 - DNA, 21 bp, synthetic construct
  source 1..21: mol_type = other DNA; mol_type = other DNA
aaagacgactttgtagtatgg

SEQ ID NO: 34559 - DNA, 21 bp, synthetic construct
  source 1..21: mol_type = other DNA; mol_type = other DNA
agcgacggtcacagcaagtgg

SEQ ID NO: 34560 - DNA, 21 bp, synthetic construct
  source 1..21: mol_type = other DNA; mol_type = other DNA
ggctcaggcacaaagtgcggg

SEQ ID NO: 34561 - DNA, 21 bp, synthetic construct
  source 1..21: mol_type = other DNA; mol_type = other DNA
aagaatggaacctcgtcatgg

SEQ ID NO: 34562 - DNA, 21 bp, synthetic construct
  source 1..21: mol_type = other DNA; mol_type = other DNA
ttctccagagctaactataac

SEQ ID NO: 34563 - DNA, 21 bp, synthetic construct
  source 1..21: mol_type = other DNA; mol_type = other DNA
tatttgaaaagtcagtactac

SEQ ID NO: 34564 - DNA, 21 bp, synthetic construct
  source 1..21: mol_type = other DNA; mol_type = other DNA
tgtgcagatagaaaacagggc

SEQ ID NO: 34565 - DNA, 21 bp, synthetic construct
  source 1..21: mol_type = other DNA; mol_type = other DNA
aagagcgactatgctacctat

SEQ ID NO: 34566 - DNA, 21 bp, synthetic construct
  source 1..21: mol_type = other DNA; mol_type = other DNA
aaagatgactacaatacgtat

SEQ ID NO: 34567 - DNA, 21 bp, synthetic construct
  source 1..21: mol_type = other DNA; mol_type = other DNA
tactataccggtagggccgat

SEQ ID NO: 34568 - DNA, 21 bp, synthetic construct
  source 1..21: mol_type = other DNA; mol_type = other DNA
gatggttacagtcgtgagtgg

SEQ ID NO: 34569 - DNA, 21 bp, synthetic construct
  source 1..21: mol_type = other DNA; mol_type = other DNA
tattggactggtaccgcgtca

SEQ ID NO: 34570 - DNA, 21 bp, synthetic construct
  source 1..21: mol_type = other DNA; mol_type = other DNA
acagacggcactgttaaatgc

SEQ ID NO: 34571 - DNA, 21 bp, synthetic construct
  source 1..21: mol_type = other DNA; mol_type = other DNA
agagaggattggtcgacgtat

SEQ ID NO: 34572 - DNA, 21 bp, synthetic construct
  source 1..21: mol_type = other DNA; mol_type = other DNA
actagtgactatatgagcttt

SEQ ID NO: 34573 - DNA, 21 bp, synthetic construct
  source 1..21: mol_type = other DNA; mol_type = other DNA
tccgatgggacatcaaagtgg

SEQ ID NO: 34574 - DNA, 21 bp, synthetic construct
  source 1..21: mol_type = other DNA; mol_type = other DNA
tattctcgacaaaacaacaat

SEQ ID NO: 34575 - DNA, 21 bp, synthetic construct
  source 1..21: mol_type = other DNA; mol_type = other DNA
tattcaagggctaatcaaaat

SEQ ID NO: 34576 - DNA, 21 bp, synthetic construct
  source 1..21: mol_type = other DNA; mol_type = other DNA
atcactagttttaacggtatc

SEQ ID NO: 34577 - DNA, 21 bp, synthetic construct
  source 1..21: mol_type = other DNA; mol_type = other DNA
tactcatcgagcaacggagtg

SEQ ID NO: 34578 - DNA, 21 bp, synthetic construct
  source 1..21: mol_type = other DNA; mol_type = other DNA
tatcgcagcacaaatggagtg

SEQ ID NO: 34579 - DNA, 21 bp, synthetic construct
  source 1..21: mol_type = other DNA; mol_type = other DNA
tgcaaaccaagccccttatct

SEQ ID NO: 34580 - DNA, 21 bp, synthetic construct
  source 1..21: mol_type = other DNA; mol_type = other DNA
tactttgctggtaagccagat

SEQ ID NO: 34581 - DNA, 21 bp, synthetic construct
  source 1..21: mol_type = other DNA; mol_type = other DNA
tatttccaagggcagcacgaa

SEQ ID NO: 34582 - DNA, 21 bp, synthetic construct
  source 1..21: mol_type = other DNA; mol_type = other DNA
tggttgaaaagtcagggcaat

SEQ ID NO: 34583 - DNA, 21 bp, synthetic construct
  source 1..21: mol_type = other DNA; mol_type = other DNA
tgcaaactccaaccaaagccg

SEQ ID NO: 34584 - DNA, 21 bp, synthetic construct
  source 1..21: mol_type = other DNA; mol_type = other DNA
atgtgggacggcactttcgca

SEQ ID NO: 34585 - DNA, 21 bp, synthetic construct
  source 1..21: mol_type = other DNA; mol_type = other DNA
acgtcagattatgaatcttac

SEQ ID NO: 34586 - DNA, 21 bp, synthetic construct
  source 1..21: mol_type = other DNA; mol_type = other DNA
tgcaaaccccagactcctact

SEQ ID NO: 34587 - DNA, 21 bp, synthetic construct
  source 1..21: mol_type = other DNA; mol_type = other DNA
tattctcgaattaatcaaaat

SEQ ID NO: 34588 - DNA, 21 bp, synthetic construct
  source 1..21: mol_type = other DNA; mol_type = other DNA
tatttcacagggctcgtggcg

SEQ ID NO: 34589 - DNA, 21 bp, synthetic construct
  source 1..21: mol_type = other DNA; mol_type = other DNA
tgtaagccgcagtggccgagt

SEQ ID NO: 34590 - DNA, 21 bp, synthetic construct
  source 1..21: mol_type = other DNA; mol_type = other DNA
gaattatcatccatcaaatgg

SEQ ID NO: 34591 - DNA, 21 bp, synthetic construct
  source 1..21: mol_type = other DNA; mol_type = other DNA
tattccagacacaatctaaac

SEQ ID NO: 34592 - DNA, 21 bp, synthetic construct
  source 1..21: mol_type = other DNA; mol_type = other DNA
gggtccgagtttgatcactgg

SEQ ID NO: 34593 - DNA, 21 bp, synthetic construct
  source 1..21: mol_type = other DNA; mol_type = other DNA
aaatacgcccgttcgagcgaa

SEQ ID NO: 34594 - DNA, 21 bp, synthetic construct
  source 1..21: mol_type = other DNA; mol_type = other DNA
tactggagtggccaagtttca

SEQ ID NO: 34595 - DNA, 21 bp, synthetic construct
  source 1..21: mol_type = other DNA; mol_type = other DNA
ttcgagtccgataatggtgtg

SEQ ID NO: 34596 - DNA, 21 bp, synthetic construct
  source 1..21: mol_type = other DNA; mol_type = other DNA
aagaatgattataatacctgg

SEQ ID NO: 34597 - DNA, 21 bp, synthetic construct
  source 1..21: mol_type = other DNA; mol_type = other DNA
agcccagggtatccaagcttt

SEQ ID NO: 34598 - DNA, 21 bp, synthetic construct
  source 1..21: mol_type = other DNA; mol_type = other DNA
tattggacaggaaccttagaa

SEQ ID NO: 34599 - DNA, 21 bp, synthetic construct
  source 1..21: mol_type = other DNA; mol_type = other DNA
tggttcagtggtattagtgaa

SEQ ID NO: 34600 - DNA, 21 bp, synthetic construct
  source 1..21: mol_type = other DNA; mol_type = other DNA
tgttcgaaggagaaccgcgag

SEQ ID NO: 34601 - DNA, 21 bp, synthetic construct
  source 1..21: mol_type = other DNA; mol_type = other DNA
cttccggacagcgtacgctgg

SEQ ID NO: 34602 - DNA, 21 bp, synthetic construct
  source 1..21: mol_type = other DNA; mol_type = other DNA
ttcttcacgggaagaacggat

SEQ ID NO: 34603 - DNA, 21 bp, synthetic construct
  source 1..21: mol_type = other DNA; mol_type = other DNA
tgtaagatgaactgcatggga

SEQ ID NO: 34604 - DNA, 21 bp, synthetic construct
  source 1..21: mol_type = other DNA; mol_type = other DNA
cgtgatgagttcacactttgg

SEQ ID NO: 34605 - DNA, 21 bp, synthetic construct
  source 1..21: mol_type = other DNA; mol_type = other DNA
tgtaaatcattaaagactgag

SEQ ID NO: 34606 - DNA, 21 bp, synthetic construct
  source 1..21: mol_type = other DNA; mol_type = other DNA
tgcaataaacctatggatgca

SEQ ID NO: 34607 - DNA, 21 bp, synthetic construct
  source 1..21: mol_type = other DNA; mol_type = other DNA
aagcaaaacgcgacagggtgt

SEQ ID NO: 34608 - DNA, 21 bp, synthetic construct
  source 1..21: mol_type = other DNA; mol_type = other DNA
cagcacaaactgcaaccgctt

SEQ ID NO: 34609 - DNA, 21 bp, synthetic construct
  source 1..21: mol_type = other DNA; mol_type = other DNA
tgcttacccaggtgtgtcgcc

SEQ ID NO: 34610 - DNA, 21 bp, synthetic construct
  source 1..21: mol_type = other DNA; mol_type = other DNA
cgcgatgaatatcagacatgg

SEQ ID NO: 34611 - DNA, 21 bp, synthetic construct
  source 1..21: mol_type = other DNA; mol_type = other DNA
ggctgtaagccccagatggga

SEQ ID NO: 34612 - DNA, 21 bp, synthetic construct
  source 1..21: mol_type = other DNA; mol_type = other DNA
ttgcaccgtctaacagaagga

SEQ ID NO: 34613 - DNA, 21 bp, synthetic construct
  source 1..21: mol_type = other DNA; mol_type = other DNA
ttcgacggttcgtgcaaggct

SEQ ID NO: 34614 - DNA, 21 bp, synthetic construct
  source 1..21: mol_type = other DNA; mol_type = other DNA
tactacacggggactatagat

SEQ ID NO: 34615 - DNA, 21 bp, synthetic construct
  source 1..21: mol_type = other DNA; mol_type = other DNA
tgcaaaattccatctaaggaa

SEQ ID NO: 34616 - DNA, 21 bp, synthetic construct
  source 1..21: mol_type = other DNA; mol_type = other DNA
attagcctcacacaaagtttt

SEQ ID NO: 34617 - DNA, 21 bp, synthetic construct
  source 1..21: mol_type = other DNA; mol_type = other DNA
tgtctccctttgtgtgggcct

SEQ ID NO: 34618 - DNA, 21 bp, synthetic construct
  source 1..21: mol_type = other DNA; mol_type = other DNA
gatgaaaatgcatttccctat

SEQ ID NO: 34619 - DNA, 21 bp, synthetic construct
  source 1..21: mol_type = other DNA; mol_type = other DNA
tactggtcagaagtgaaagag

SEQ ID NO: 34620 - DNA, 21 bp, synthetic construct
  source 1..21: mol_type = other DNA; mol_type = other DNA
ctgatgaagagttgccttcca

SEQ ID NO: 34621 - DNA, 21 bp, synthetic construct
  source 1..21: mol_type = other DNA; mol_type = other DNA
tgccaagacgacaagaaggga

SEQ ID NO: 34622 - DNA, 21 bp, synthetic construct
  source 1..21: mol_type = other DNA; mol_type = other DNA
atccccgaaagatgctgtaag

SEQ ID NO: 34623 - DNA, 21 bp, synthetic construct
  source 1..21: mol_type = other DNA; mol_type = other DNA
ttttttacaggccgcacagac

SEQ ID NO: 34624 - DNA, 21 bp, synthetic construct
  source 1..21: mol_type = other DNA; mol_type = other DNA
cgcgacgactggagcacctgg

SEQ ID NO: 34625 - DNA, 21 bp, synthetic construct
  source 1..21: mol_type = other DNA; mol_type = other DNA
tattttgcgggtaagccagat

SEQ ID NO: 34626 - DNA, 21 bp, synthetic construct
  source 1..21: mol_type = other DNA; mol_type = other DNA
caagactctaccaacggcaga

SEQ ID NO: 34627 - DNA, 21 bp, synthetic construct
  source 1..21: mol_type = other DNA; mol_type = other DNA
tgcggtggtggaaaagcaccg

SEQ ID NO: 34628 - DNA, 21 bp, synthetic construct
  source 1..21: mol_type = other DNA; mol_type = other DNA
tatactaaactcgatatgaat

SEQ ID NO: 34629 - DNA, 21 bp, synthetic construct
  source 1..21: mol_type = other DNA; mol_type = other DNA
tgtgcaaagccgatgacagca

SEQ ID NO: 34630 - DNA, 21 bp, synthetic construct
  source 1..21: mol_type = other DNA; mol_type = other DNA
ggtggcggctggacgatggga

SEQ ID NO: 34631 - DNA, 21 bp, synthetic construct
  source 1..21: mol_type = other DNA; mol_type = other DNA
tacgcaaagattgggttcaac

SEQ ID NO: 34632 - DNA, 21 bp, synthetic construct
  source 1..21: mol_type = other DNA; mol_type = other DNA
tgcaatcgccctatgaccgcg

SEQ ID NO: 34633 - DNA, 21 bp, synthetic construct
  source 1..21: mol_type = other DNA; mol_type = other DNA
aaagcgagcaatgaggcatgc

SEQ ID NO: 34634 - DNA, 21 bp, synthetic construct
  source 1..21: mol_type = other DNA; mol_type = other DNA
ttcgcaaagagtaaggctaac

SEQ ID NO: 34635 - DNA, 21 bp, synthetic construct
  source 1..21: mol_type = other DNA; mol_type = other DNA
ctggtcaagagtcagccgtgt

SEQ ID NO: 34636 - DNA, 21 bp, synthetic construct
  source 1..21: mol_type = other DNA; mol_type = other DNA
gtcgtcgattacatgtcccac

SEQ ID NO: 34637 - DNA, 21 bp, synthetic construct
  source 1..21: mol_type = other DNA; mol_type = other DNA
tggaacccgatgtgcaaggcg

SEQ ID NO: 34638 - DNA, 21 bp, synthetic construct
  source 1..21: mol_type = other DNA; mol_type = other DNA
tgtagatcgggtgcggcttta

SEQ ID NO: 34639 - DNA, 21 bp, synthetic construct
  source 1..21: mol_type = other DNA; mol_type = other DNA
tgcggtaaggctcactctagt

SEQ ID NO: 34640 - DNA, 21 bp, synthetic construct
  source 1..21: mol_type = other DNA; mol_type = other DNA
tgcaacaagcctatgggcgcg

SEQ ID NO: 34641 - DNA, 21 bp, synthetic construct
  source 1..21: mol_type = other DNA; mol_type = other DNA
tgggttaaaagtcaaccactg

SEQ ID NO: 34642 - DNA, 21 bp, synthetic construct
  source 1..21: mol_type = other DNA; mol_type = other DNA
gttccagaaggatgccacggt

SEQ ID NO: 34643 - DNA, 21 bp, synthetic construct
  source 1..21: mol_type = other DNA; mol_type = other DNA
tgcttgcgaacagatattgct

SEQ ID NO: 34644 - DNA, 21 bp, synthetic construct
  source 1..21: mol_type = other DNA; mol_type = other DNA
tattttgcaggccgtaatgac

SEQ ID NO: 34645 - DNA, 21 bp, synthetic construct
  source 1..21: mol_type = other DNA; mol_type = other DNA
atgacgggtaaatcatgcctt

SEQ ID NO: 34646 - DNA, 21 bp, synthetic construct
  source 1..21: mol_type = other DNA; mol_type = other DNA
ttcgcaaagagtggttggaat

SEQ ID NO: 34647 - DNA, 21 bp, synthetic construct
  source 1..21: mol_type = other DNA; mol_type = other DNA
tactggtccggtcaggtggag

SEQ ID NO: 34648 - DNA, 21 bp, synthetic construct
  source 1..21: mol_type = other DNA; mol_type = other DNA
tttatttcgacgaatggaagg

SEQ ID NO: 34649 - DNA, 21 bp, synthetic construct
  source 1..21: mol_type = other DNA; mol_type = other DNA
gacatgcaggaccgcagttgg

SEQ ID NO: 34650 - DNA, 21 bp, synthetic construct
  source 1..21: mol_type = other DNA; mol_type = other DNA
atggatggaagtagtaagtgg

SEQ ID NO: 34651 - DNA, 21 bp, synthetic construct
  source 1..21: mol_type = other DNA; mol_type = other DNA
tatgacccagggtgcaaagag

SEQ ID NO: 34652 - DNA, 21 bp, synthetic construct
  source 1..21: mol_type = other DNA; mol_type = other DNA
aaggatagttaccatattttc

SEQ ID NO: 34653 - DNA, 21 bp, synthetic construct
  source 1..21: mol_type = other DNA; mol_type = other DNA
acagcagggatgaaatgcatt

SEQ ID NO: 34654 - DNA, 21 bp, synthetic construct
  source 1..21: mol_type = other DNA; mol_type = other DNA
tctcaggaaacttgtaagttc

SEQ ID NO: 34655 - DNA, 21 bp, synthetic construct
  source 1..21: mol_type = other DNA; mol_type = other DNA
agagagtcaggcgtcagttgg

SEQ ID NO: 34656 - DNA, 21 bp, synthetic construct
  source 1..21: mol_type = other DNA; mol_type = other DNA
atacccgagactcgctgcgct

SEQ ID NO: 34657 - DNA, 21 bp, synthetic construct
  source 1..21: mol_type = other DNA; mol_type = other DNA
tgtaccagtggaaccgggcat

SEQ ID NO: 34658 - DNA, 21 bp, synthetic construct
  source 1..21: mol_type = other DNA; mol_type = other DNA
tgcaagagtctcaaaacagaa

SEQ ID NO: 34659 - DNA, 21 bp, synthetic construct
  source 1..21: mol_type = other DNA; mol_type = other DNA
tatagtaaaacaaattacaat

SEQ ID NO: 34660 - DNA, 21 bp, synthetic construct
  source 1..21: mol_type = other DNA; mol_type = other DNA
tccacatccagcaatggggta

SEQ ID NO: 34661 - DNA, 21 bp, synthetic construct
  source 1..21: mol_type = other DNA; mol_type = other DNA
tgtgacggttcgtctaaggcg

SEQ ID NO: 34662 - DNA, 21 bp, synthetic construct
  source 1..21: mol_type = other DNA; mol_type = other DNA
gtcaaaaagtatggacccgac

SEQ ID NO: 34663 - DNA, 21 bp, synthetic construct
  source 1..21: mol_type = other DNA; mol_type = other DNA
tgtgcaccctaccagcacgag

SEQ ID NO: 34664 - DNA, 21 bp, synthetic construct
  source 1..21: mol_type = other DNA; mol_type = other DNA
tacaagagtcaacaagactgc

SEQ ID NO: 34665 - DNA, 21 bp, synthetic construct
  source 1..21: mol_type = other DNA; mol_type = other DNA
atcgggggaaagtgccccttt

SEQ ID NO: 34666 - DNA, 21 bp, synthetic construct
  source 1..21: mol_type = other DNA; mol_type = other DNA
tgtaacaagccgatgacctac

SEQ ID NO: 34667 - DNA, 21 bp, synthetic construct
  source 1..21: mol_type = other DNA; mol_type = other DNA
ttttccaaacttggctataat

SEQ ID NO: 34668 - DNA, 21 bp, synthetic construct
  source 1..21: mol_type = other DNA; mol_type = other DNA
agagacgaagcgtcggcatgg

SEQ ID NO: 34669 - DNA, 21 bp, synthetic construct
  source 1..21: mol_type = other DNA; mol_type = other DNA
tacacaccaatgtgtaaagca

SEQ ID NO: 34670 - DNA, 21 bp, synthetic construct
  source 1..21: mol_type = other DNA; mol_type = other DNA
tgcaacttaccgatgactgcc

SEQ ID NO: 34671 - DNA, 21 bp, synthetic construct
  source 1..21: mol_type = other DNA; mol_type = other DNA
agggatggagagtcatattgg

SEQ ID NO: 34672 - DNA, 21 bp, synthetic construct
  source 1..21: mol_type = other DNA; mol_type = other DNA
tggaccgaagggacacgatat

SEQ ID NO: 34673 - DNA, 21 bp, synthetic construct
  source 1..21: mol_type = other DNA; mol_type = other DNA
tatagcaaagggaacatgaat

SEQ ID NO: 34674 - DNA, 21 bp, synthetic construct
  source 1..21: mol_type = other DNA; mol_type = other DNA
acgaaggaaagcgtgccgtgt

SEQ ID NO: 34675 - DNA, 21 bp, synthetic construct
  source 1..21: mol_type = other DNA; mol_type = other DNA
acctctaccgacaacaaatgc

SEQ ID NO: 34676 - DNA, 21 bp, synthetic construct
  source 1..21: mol_type = other DNA; mol_type = other DNA
tgcgagactaaaaagccgagc

SEQ ID NO: 34677 - DNA, 21 bp, synthetic construct
  source 1..21: mol_type = other DNA; mol_type = other DNA
aatctcgagagtagagagtgg

SEQ ID NO: 34678 - DNA, 21 bp, synthetic construct
  source 1..21: mol_type = other DNA; mol_type = other DNA
caaaaacacgaggccgagtgc

SEQ ID NO: 34679 - DNA, 21 bp, synthetic construct
  source 1..21: mol_type = other DNA; mol_type = other DNA
tgtgcaaagtgtccccgtcct

SEQ ID NO: 34680 - DNA, 21 bp, synthetic construct
  source 1..21: mol_type = other DNA; mol_type = other DNA
gaggacggaacgagcaagtgg

SEQ ID NO: 34681 - DNA, 21 bp, synthetic construct
  source 1..21: mol_type = other DNA; mol_type = other DNA
tgtaacaagcctatgacgcct

SEQ ID NO: 34682 - DNA, 21 bp, synthetic construct
  source 1..21: mol_type = other DNA; mol_type = other DNA
aagaaggacatcacatgcgct

SEQ ID NO: 34683 - DNA, 21 bp, synthetic construct
  source 1..21: mol_type = other DNA; mol_type = other DNA
tactttgccggcaagactagt

SEQ ID NO: 34684 - DNA, 21 bp, synthetic construct
  source 1..21: mol_type = other DNA; mol_type = other DNA
ttgacaaaaccatgcctcacg

SEQ ID NO: 34685 - DNA, 21 bp, synthetic construct
  source 1..21: mol_type = other DNA; mol_type = other DNA
ttcttttccggtaaattggat

SEQ ID NO: 34686 - DNA, 21 bp, synthetic construct
  source 1..21: mol_type = other DNA; mol_type = other DNA
ttctctaagagcggtccaaac

SEQ ID NO: 34687 - DNA, 21 bp, synthetic construct
  source 1..21: mol_type = other DNA; mol_type = other DNA
tggacgcccaattgtaaagcg

SEQ ID NO: 34688 - DNA, 21 bp, synthetic construct
  source 1..21: mol_type = other DNA; mol_type = other DNA
gggaacggcgggagtccgtgt

SEQ ID NO: 34689 - DNA, 21 bp, synthetic construct
  source 1..21: mol_type = other DNA; mol_type = other DNA
tgtaataaaccgatgcaagca

SEQ ID NO: 34690 - DNA, 21 bp, synthetic construct
  source 1..21: mol_type = other DNA; mol_type = other DNA
tatgccaagtgcaactcgaat

SEQ ID NO: 34691 - DNA, 21 bp, synthetic construct
  source 1..21: mol_type = other DNA; mol_type = other DNA
gggagccctgggagccactgg

SEQ ID NO: 34692 - DNA, 21 bp, synthetic construct
  source 1..21: mol_type = other DNA; mol_type = other DNA
caccccagcaagtgccccccg

SEQ ID NO: 34693 - DNA, 21 bp, synthetic construct
  source 1..21: mol_type = other DNA; mol_type = other DNA
tactggggcggtataacggag

SEQ ID NO: 34694 - DNA, 21 bp, synthetic construct
  source 1..21: mol_type = other DNA; mol_type = other DNA
ttatgggatggaaccaacgcc

SEQ ID NO: 34695 - DNA, 21 bp, synthetic construct
  source 1..21: mol_type = other DNA; mol_type = other DNA
tgtaaacctagcaagttggag

SEQ ID NO: 34696 - DNA, 21 bp, synthetic construct
  source 1..21: mol_type = other DNA; mol_type = other DNA
tatagtcccggttgtaaggag

SEQ ID NO: 34697 - DNA, 21 bp, synthetic construct
  source 1..21: mol_type = other DNA; mol_type = other DNA
ggcgatgagtatatgcccttt

SEQ ID NO: 34698 - DNA, 21 bp, synthetic construct
  source 1..21: mol_type = other DNA; mol_type = other DNA
gatgacggtaggtcacggtat

SEQ ID NO: 34699 - DNA, 21 bp, synthetic construct
  source 1..21: mol_type = other DNA; mol_type = other DNA
tacagtagggcctcggatgac

SEQ ID NO: 34700 - DNA, 21 bp, synthetic construct
  source 1..21: mol_type = other DNA; mol_type = other DNA
agagagtacgattcttttcca

SEQ ID NO: 34701 - DNA, 21 bp, synthetic construct
  source 1..21: mol_type = other DNA; mol_type = other DNA
ggtggcagtagtagcacgtgg

SEQ ID NO: 34702 - DNA, 21 bp, synthetic construct
  source 1..21: mol_type = other DNA; mol_type = other DNA
agatcagcagatgctttccca

SEQ ID NO: 34703 - DNA, 21 bp, synthetic construct
  source 1..21: mol_type = other DNA; mol_type = other DNA
tatttttcgggtagggaagac

SEQ ID NO: 34704 - DNA, 21 bp, synthetic construct
  source 1..21: mol_type = other DNA; mol_type = other DNA
tgcaagccgccaatgtttgag

SEQ ID NO: 34705 - DNA, 21 bp, synthetic construct
  source 1..21: mol_type = other DNA; mol_type = other DNA
gtagaggcgagtcgcagttgg

SEQ ID NO: 34706 - DNA, 21 bp, synthetic construct
  source 1..21: mol_type = other DNA; mol_type = other DNA
ataaaaagcaacggcgattgc

SEQ ID NO: 34707 - DNA, 21 bp, synthetic construct
  source 1..21: mol_type = other DNA; mol_type = other DNA
tgcaaggataaaccacaggta

SEQ ID NO: 34708 - DNA, 21 bp, synthetic construct
  source 1..21: mol_type = other DNA; mol_type = other DNA
gatggttactctgggcgggat

SEQ ID NO: 34709 - DNA, 21 bp, synthetic construct
  source 1..21: mol_type = other DNA; mol_type = other DNA
atgacgggtagtagttgtctc

SEQ ID NO: 34710 - DNA, 21 bp, synthetic construct
  source 1..21: mol_type = other DNA; mol_type = other DNA
cgaggggaagacgcttatcca

SEQ ID NO: 34711 - DNA, 21 bp, synthetic construct
  source 1..21: mol_type = other DNA; mol_type = other DNA
tgtaaaccacccatggtctca

SEQ ID NO: 34712 - DNA, 21 bp, synthetic construct
  source 1..21: mol_type = other DNA; mol_type = other DNA
tacgcgaaactcgggtttaat

SEQ ID NO: 34713 - DNA, 21 bp, synthetic construct
  source 1..21: mol_type = other DNA; mol_type = other DNA
gtccccgagtgtatgaaaccc

SEQ ID NO: 34714 - DNA, 21 bp, synthetic construct
  source 1..21: mol_type = other DNA; mol_type = other DNA
ccggaaagtacaaatggggtc

SEQ ID NO: 34715 - DNA, 21 bp, synthetic construct
  source 1..21: mol_type = other DNA; mol_type = other DNA
atgcacgggacctcctgccta

SEQ ID NO: 34716 - DNA, 21 bp, synthetic construct
  source 1..21: mol_type = other DNA; mol_type = other DNA
tactggacgggtgagaaagag

SEQ ID NO: 34717 - DNA, 21 bp, synthetic construct
  source 1..21: mol_type = other DNA; mol_type = other DNA
tatggaaagggggaaacgtgt

SEQ ID NO: 34718 - DNA, 21 bp, synthetic construct
  source 1..21: mol_type = other DNA; mol_type = other DNA
ggaagtcctggtaatagttgg

SEQ ID NO: 34719 - DNA, 21 bp, synthetic construct
  source 1..21: mol_type = other DNA; mol_type = other DNA
tatagtcggactaaccacaat

SEQ ID NO: 34720 - DNA, 21 bp, synthetic construct
  source 1..21: mol_type = other DNA; mol_type = other DNA
tattttagtggcattcctgta

SEQ ID NO: 34721 - DNA, 21 bp, synthetic construct
  source 1..21: mol_type = other DNA; mol_type = other DNA
ttcttctctggacagcacgag

SEQ ID NO: 34722 - DNA, 21 bp, synthetic construct
  source 1..21: mol_type = other DNA; mol_type = other DNA
tatgccaggctcaataacaac

SEQ ID NO: 34723 - DNA, 21 bp, synthetic construct
  source 1..21: mol_type = other DNA; mol_type = other DNA
tgcggggcgctaagaatctcg

SEQ ID NO: 34724 - DNA, 21 bp, synthetic construct
  source 1..21: mol_type = other DNA; mol_type = other DNA
tgcaagccttgtccgcttaga

SEQ ID NO: 34725 - DNA, 21 bp, synthetic construct
  source 1..21: mol_type = other DNA; mol_type = other DNA
ttttcgaagacaggccctaac

SEQ ID NO: 34726 - DNA, 21 bp, synthetic construct
  source 1..21: mol_type = other DNA; mol_type = other DNA
tactttacagggtacacggaa

SEQ ID NO: 34727 - DNA, 21 bp, synthetic construct
  source 1..21: mol_type = other DNA; mol_type = other DNA
tactggagtggcactactagc

SEQ ID NO: 34728 - DNA, 21 bp, synthetic construct
  source 1..21: mol_type = other DNA; mol_type = other DNA
cgggaaggcagttcatattgg

SEQ ID NO: 34729 - DNA, 21 bp, synthetic construct
  source 1..21: mol_type = other DNA; mol_type = other DNA
tttttctcggggcgctacgac

SEQ ID NO: 34730 - DNA, 21 bp, synthetic construct
  source 1..21: mol_type = other DNA; mol_type = other DNA
tatgctcgtatcggagataac

SEQ ID NO: 34731 - DNA, 21 bp, synthetic construct
  source 1..21: mol_type = other DNA; mol_type = other DNA
tgtccatcaaaaacaggacac

SEQ ID NO: 34732 - DNA, 21 bp, synthetic construct
  source 1..21: mol_type = other DNA; mol_type = other DNA
tcaatgagcactaacggggtg

SEQ ID NO: 34733 - DNA, 21 bp, synthetic construct
  source 1..21: mol_type = other DNA; mol_type = other DNA
atgtacaatgattgctgcgtc

SEQ ID NO: 34734 - DNA, 21 bp, synthetic construct
  source 1..21: mol_type = other DNA; mol_type = other DNA
cggagtgagttcaggacgtat

SEQ ID NO: 34735 - DNA, 21 bp, synthetic construct
  source 1..21: mol_type = other DNA; mol_type = other DNA
acgtggacgggggagaacgct

SEQ ID NO: 34736 - DNA, 21 bp, synthetic construct
  source 1..21: mol_type = other DNA; mol_type = other DNA
ggtattgaaactagcaggtgg

SEQ ID NO: 34737 - DNA, 21 bp, synthetic construct
  source 1..21: mol_type = other DNA; mol_type = other DNA
tgtaataaaccaatgagcgct

SEQ ID NO: 34738 - DNA, 21 bp, synthetic construct
  source 1..21: mol_type = other DNA; mol_type = other DNA
tattatacgggcgtgagtcta

SEQ ID NO: 34739 - DNA, 21 bp, synthetic construct
  source 1..21: mol_type = other DNA; mol_type = other DNA
tgggtaaagtcccagccttta

SEQ ID NO: 34740 - DNA, 21 bp, synthetic construct
  source 1..21: mol_type = other DNA; mol_type = other DNA
tgtaaacccccaatggacgga

SEQ ID NO: 34741 - DNA, 21 bp, synthetic construct
  source 1..21: mol_type = other DNA; mol_type = other DNA
ccctgtaagccgcaacccatg

SEQ ID NO: 34742 - DNA, 21 bp, synthetic construct
  source 1..21: mol_type = other DNA; mol_type = other DNA
ctcctgtctgatcgcgtgtgg

SEQ ID NO: 34743 - DNA, 21 bp, synthetic construct
  source 1..21: mol_type = other DNA; mol_type = other DNA
tggactcagatgtgtaaggcg

SEQ ID NO: 34744 - DNA, 21 bp, synthetic construct
  source 1..21: mol_type = other DNA; mol_type = other DNA
tactggtcacacatcaaagac

SEQ ID NO: 34745 - DNA, 21 bp, synthetic construct
  source 1..21: mol_type = other DNA; mol_type = other DNA
accataggcggggcctgcata

SEQ ID NO: 34746 - DNA, 21 bp, synthetic construct
  source 1..21: mol_type = other DNA; mol_type = other DNA
atgactggaacttcttgtgcc

SEQ ID NO: 34747 - DNA, 21 bp, synthetic construct
  source 1..21: mol_type = other DNA; mol_type = other DNA
ttctttacaggcaaaatggat

SEQ ID NO: 34748 - DNA, 21 bp, synthetic construct
  source 1..21: mol_type = other DNA; mol_type = other DNA
cgcgagggaacgtcgctctgg

SEQ ID NO: 34749 - DNA, 21 bp, synthetic construct
  source 1..21: mol_type = other DNA; mol_type = other DNA
atttattcgacgaacggaatc

SEQ ID NO: 34750 - DNA, 21 bp, synthetic construct
  source 1..21: mol_type = other DNA; mol_type = other DNA
ggatctgagtttatgtcatac

SEQ ID NO: 34751 - DNA, 21 bp, synthetic construct
  source 1..21: mol_type = other DNA; mol_type = other DNA
cgagacgagttggtattccca

SEQ ID NO: 34752 - DNA, 21 bp, synthetic construct
  source 1..21: mol_type = other DNA; mol_type = other DNA
tactttacgggcatgatacaa

SEQ ID NO: 34753 - DNA, 21 bp, synthetic construct
  source 1..21: mol_type = other DNA; mol_type = other DNA
tatagccgccagaaccacaat

SEQ ID NO: 34754 - DNA, 21 bp, synthetic construct
  source 1..21: mol_type = other DNA; mol_type = other DNA
gtcgcgcagggctgcaaaccc

SEQ ID NO: 34755 - DNA, 21 bp, synthetic construct
  source 1..21: mol_type = other DNA; mol_type = other DNA
tatgccagacaaaatgtaaac

SEQ ID NO: 34756 - DNA, 21 bp, synthetic construct
  source 1..21: mol_type = other DNA; mol_type = other DNA
tactcacgtaacggttttaac

SEQ ID NO: 34757 - DNA, 21 bp, synthetic construct
  source 1..21: mol_type = other DNA; mol_type = other DNA
acccaggagagcaataaatgt

SEQ ID NO: 34758 - DNA, 21 bp, synthetic construct
  source 1..21: mol_type = other DNA; mol_type = other DNA
tgtgcgatcaccccctgcggt

SEQ ID NO: 34759 - DNA, 21 bp, synthetic construct
  source 1..21: mol_type = other DNA; mol_type = other DNA
agagattacgaagtataccct

SEQ ID NO: 34760 - DNA, 21 bp, synthetic construct
  source 1..21: mol_type = other DNA; mol_type = other DNA
tacgcaagaaacgggggtaat

SEQ ID NO: 34761 - DNA, 21 bp, synthetic construct
  source 1..21: mol_type = other DNA; mol_type = other DNA
tgcaccgtaaaaacgggtcac

SEQ ID NO: 34762 - DNA, 21 bp, synthetic construct
  source 1..21: mol_type = other DNA; mol_type = other DNA
agggatgcagtgtctagttgg

SEQ ID NO: 34763 - DNA, 21 bp, synthetic construct
  source 1..21: mol_type = other DNA; mol_type = other DNA
aggacatatacggaatttcca

SEQ ID NO: 34764 - DNA, 21 bp, synthetic construct
  source 1..21: mol_type = other DNA; mol_type = other DNA
aggactgaatttcattcgttt

SEQ ID NO: 34765 - DNA, 21 bp, synthetic construct
  source 1..21: mol_type = other DNA; mol_type = other DNA
ttcttttcaggaactagggcg

SEQ ID NO: 34766 - DNA, 21 bp, synthetic construct
  source 1..21: mol_type = other DNA; mol_type = other DNA
cgtactagagattcttatccg

SEQ ID NO: 34767 - DNA, 21 bp, synthetic construct
  source 1..21: mol_type = other DNA; mol_type = other DNA
tgtaacaaggccatgacggcc

SEQ ID NO: 34768 - DNA, 21 bp, synthetic construct
  source 1..21: mol_type = other DNA; mol_type = other DNA
cgcgacaacggcgtaagatgg

SEQ ID NO: 34769 - DNA, 21 bp, synthetic construct
  source 1..21: mol_type = other DNA; mol_type = other DNA
tatgcccgaaacggtgacaat

SEQ ID NO: 34770 - DNA, 21 bp, synthetic construct
  source 1..21: mol_type = other DNA; mol_type = other DNA
ttgtcatctacgaatggggtg

SEQ ID NO: 34771 - DNA, 21 bp, synthetic construct
  source 1..21: mol_type = other DNA; mol_type = other DNA
ctggctaaaagtggtcagaac

SEQ ID NO: 34772 - DNA, 21 bp, synthetic construct
  source 1..21: mol_type = other DNA; mol_type = other DNA
tgtaaacccggcacagttatg

SEQ ID NO: 34773 - DNA, 21 bp, synthetic construct
  source 1..21: mol_type = other DNA; mol_type = other DNA
gttctctctgatgtaaaatgg

SEQ ID NO: 34774 - DNA, 21 bp, synthetic construct
  source 1..21: mol_type = other DNA; mol_type = other DNA
tactcccgtcaaaactacaac

SEQ ID NO: 34775 - DNA, 21 bp, synthetic construct
  source 1..21: mol_type = other DNA; mol_type = other DNA
ttcaagaagatgaattacaat

SEQ ID NO: 34776 - DNA, 21 bp, synthetic construct
  source 1..21: mol_type = other DNA; mol_type = other DNA
tgcaaggccaacgcaccagac

SEQ ID NO: 34777 - DNA, 21 bp, synthetic construct
  source 1..21: mol_type = other DNA; mol_type = other DNA
tgtgatggttcgtggaaggcg

SEQ ID NO: 34778 - DNA, 21 bp, synthetic construct
  source 1..21: mol_type = other DNA; mol_type = other DNA
tgcgaaggaaaaaaagaagca

SEQ ID NO: 34779 - DNA, 21 bp, synthetic construct
  source 1..21: mol_type = other DNA; mol_type = other DNA
gcaggcgaatgggtcacttat

SEQ ID NO: 34780 - DNA, 21 bp, synthetic construct
  source 1..21: mol_type = other DNA; mol_type = other DNA
tatcacaagaacatgccgaac

SEQ ID NO: 34781 - DNA, 21 bp, synthetic construct
  source 1..21: mol_type = other DNA; mol_type = other DNA
aaaaacgaccacgttaagtgg

SEQ ID NO: 34782 - DNA, 21 bp, synthetic construct
  source 1..21: mol_type = other DNA; mol_type = other DNA
tactaccagggtattcgcgcg

SEQ ID NO: 34783 - DNA, 21 bp, synthetic construct
  source 1..21: mol_type = other DNA; mol_type = other DNA
tatagtcgccaagggggcaac

SEQ ID NO: 34784 - DNA, 21 bp, synthetic construct
  source 1..21: mol_type = other DNA; mol_type = other DNA
ttcgctcgcagcggggcgaac

SEQ ID NO: 34785 - DNA, 21 bp, synthetic construct
  source 1..21: mol_type = other DNA; mol_type = other DNA
aaacaagacagtggacagtgc

SEQ ID NO: 34786 - DNA, 21 bp, synthetic construct
  source 1..21: mol_type = other DNA; mol_type = other DNA
gttgacgaatttcgtcatttt

SEQ ID NO: 34787 - DNA, 21 bp, synthetic construct
  source 1..21: mol_type = other DNA; mol_type = other DNA
cacgagtcatctaatggtgtc

SEQ ID NO: 34788 - DNA, 21 bp, synthetic construct
  source 1..21: mol_type = other DNA; mol_type = other DNA
tacttcacaggtgagatttta

SEQ ID NO: 34789 - DNA, 21 bp, synthetic construct
  source 1..21: mol_type = other DNA; mol_type = other DNA
tcggacggatactctaaatgg

SEQ ID NO: 34790 - DNA, 21 bp, synthetic construct
  source 1..21: mol_type = other DNA; mol_type = other DNA
tacgtgatatcggatcgcaat

SEQ ID NO: 34791 - DNA, 21 bp, synthetic construct
  source 1..21: mol_type = other DNA; mol_type = other DNA
tacgttcggtacgatacgggg

SEQ ID NO: 34792 - DNA, 21 bp, synthetic construct
  source 1..21: mol_type = other DNA; mol_type = other DNA
tatagtcgtaatggacacaat

SEQ ID NO: 34793 - DNA, 21 bp, synthetic construct
  source 1..21: mol_type = other DNA; mol_type = other DNA
gaagaagactggtcgaagtgg

SEQ ID NO: 34794 - DNA, 21 bp, synthetic construct
  source 1..21: mol_type = other DNA; mol_type = other DNA
ggcagtggtacctcaacgtgg

SEQ ID NO: 34795 - DNA, 21 bp, synthetic construct
  source 1..21: mol_type = other DNA; mol_type = other DNA
tgtaatggggcaggtccgagt

SEQ ID NO: 34796 - DNA, 21 bp, synthetic construct
  source 1..21: mol_type = other DNA; mol_type = other DNA
aaagagggtacgagccgttgg

SEQ ID NO: 34797 - DNA, 21 bp, synthetic construct
  source 1..21: mol_type = other DNA; mol_type = other DNA
tataaatcaaatactacatgc

SEQ ID NO: 34798 - DNA, 21 bp, synthetic construct
  source 1..21: mol_type = other DNA; mol_type = other DNA
tatgcgcgcatgggcaataac

SEQ ID NO: 34799 - DNA, 21 bp, synthetic construct
  source 1..21: mol_type = other DNA; mol_type = other DNA
tatttcagcggaacggtaact

SEQ ID NO: 34800 - DNA, 21 bp, synthetic construct
  source 1..21: mol_type = other DNA; mol_type = other DNA
cacagccgcttaaacgaatca

SEQ ID NO: 34801 - DNA, 21 bp, synthetic construct
  source 1..21: mol_type = other DNA; mol_type = other DNA
tttgctagaatgaattgcaat

SEQ ID NO: 34802 - DNA, 21 bp, synthetic construct
  source 1..21: mol_type = other DNA; mol_type = other DNA
catgggtctgggaacttcgta

SEQ ID NO: 34803 - DNA, 21 bp, synthetic construct
  source 1..21: mol_type = other DNA; mol_type = other DNA
tatgagcatgggtgcaaggag

SEQ ID NO: 34804 - DNA, 21 bp, synthetic construct
  source 1..21: mol_type = other DNA; mol_type = other DNA
atcaccgagcaaaagaattgc

SEQ ID NO: 34805 - DNA, 21 bp, synthetic construct
  source 1..21: mol_type = other DNA; mol_type = other DNA
tgtaaaaaaggctgctttgaa

SEQ ID NO: 34806 - DNA, 21 bp, synthetic construct
  source 1..21: mol_type = other DNA; mol_type = other DNA
ttttttaccgggagaatggat

SEQ ID NO: 34807 - DNA, 21 bp, synthetic construct
  source 1..21: mol_type = other DNA; mol_type = other DNA
ggcggtgacggaagcacgtgg

SEQ ID NO: 34808 - DNA, 21 bp, synthetic construct
  source 1..21: mol_type = other DNA; mol_type = other DNA
tactcaagaaatgggcataac

SEQ ID NO: 34809 - DNA, 21 bp, synthetic construct
  source 1..21: mol_type = other DNA; mol_type = other DNA
tattattctgggatgagagat

SEQ ID NO: 34810 - DNA, 21 bp, synthetic construct
  source 1..21: mol_type = other DNA; mol_type = other DNA
cgtgatgaattccagacatat

SEQ ID NO: 34811 - DNA, 21 bp, synthetic construct
  source 1..21: mol_type = other DNA; mol_type = other DNA
cccggacctgagagaaagtgg

SEQ ID NO: 34812 - DNA, 21 bp, synthetic construct
  source 1..21: mol_type = other DNA; mol_type = other DNA
cgagaggaggtgagtagttgg

SEQ ID NO: 34813 - DNA, 21 bp, synthetic construct
  source 1..21: mol_type = other DNA; mol_type = other DNA
ctgcccaaaatgggttgcgct

SEQ ID NO: 34814 - DNA, 21 bp, synthetic construct
  source 1..21: mol_type = other DNA; mol_type = other DNA
tattggactggacgcgctgat

SEQ ID NO: 34815 - DNA, 21 bp, synthetic construct
  source 1..21: mol_type = other DNA; mol_type = other DNA
gtttgcaagccgtgcttgact

SEQ ID NO: 34816 - DNA, 21 bp, synthetic construct
  source 1..21: mol_type = other DNA; mol_type = other DNA
ggtagcgagggttctacatgg

SEQ ID NO: 34817 - DNA, 21 bp, synthetic construct
  source 1..21: mol_type = other DNA; mol_type = other DNA
ggaggaagcggtagttcgtgg

SEQ ID NO: 34818 - DNA, 21 bp, synthetic construct
  source 1..21: mol_type = other DNA; mol_type = other DNA
gtgggcggcacttgtaagtac

SEQ ID NO: 34819 - DNA, 21 bp, synthetic construct
  source 1..21: mol_type = other DNA; mol_type = other DNA
tatttcagcggtttagtttcg

SEQ ID NO: 34820 - DNA, 21 bp, synthetic construct
  source 1..21: mol_type = other DNA; mol_type = other DNA
accacagagggggttcggtgg

SEQ ID NO: 34821 - DNA, 21 bp, synthetic construct
  source 1..21: mol_type = other DNA; mol_type = other DNA
tatgtacgaaatgatgacaaa

SEQ ID NO: 34822 - DNA, 21 bp, synthetic construct
  source 1..21: mol_type = other DNA; mol_type = other DNA
ctagcacgttcaggaggtggc

SEQ ID NO: 34823 - DNA, 21 bp, synthetic construct
  source 1..21: mol_type = other DNA; mol_type = other DNA
tttgcacgcagcggcatgaat

SEQ ID NO: 34824 - DNA, 21 bp, synthetic construct
  source 1..21: mol_type = other DNA; mol_type = other DNA
atcgcgagtcgttgtccccat

SEQ ID NO: 34825 - DNA, 21 bp, synthetic construct
  source 1..21: mol_type = other DNA; mol_type = other DNA
ggcggggggacaaccaggtgg

SEQ ID NO: 34826 - DNA, 21 bp, synthetic construct
  source 1..21: mol_type = other DNA; mol_type = other DNA
tatgcccgcttaggtattaat

SEQ ID NO: 34827 - DNA, 21 bp, synthetic construct
  source 1..21: mol_type = other DNA; mol_type = other DNA
ggtcattgcggagcgaccgtt

SEQ ID NO: 34828 - DNA, 21 bp, synthetic construct
  source 1..21: mol_type = other DNA; mol_type = other DNA
gtcgaatccgaccatggacgc

SEQ ID NO: 34829 - DNA, 21 bp, synthetic construct
  source 1..21: mol_type = other DNA; mol_type = other DNA
tatgctcgaatgggcttcaat

SEQ ID NO: 34830 - DNA, 21 bp, synthetic construct
  source 1..21: mol_type = other DNA; mol_type = other DNA
gcctggtcgacgaatgggata

SEQ ID NO: 34831 - DNA, 21 bp, synthetic construct
  source 1..21: mol_type = other DNA; mol_type = other DNA
gggggaggagtcgtgcgttgg

SEQ ID NO: 34832 - DNA, 21 bp, synthetic construct
  source 1..21: mol_type = other DNA; mol_type = other DNA
ataaatagtaccaacggcgtg

SEQ ID NO: 34833 - DNA, 21 bp, synthetic construct
  source 1..21: mol_type = other DNA; mol_type = other DNA
tgtgcacctgtctaccgcgag

SEQ ID NO: 34834 - DNA, 21 bp, synthetic construct
  source 1..21: mol_type = other DNA; mol_type = other DNA
ttctggaccgggaaggtggag

SEQ ID NO: 34835 - DNA, 21 bp, synthetic construct
  source 1..21: mol_type = other DNA; mol_type = other DNA
tggcaatctactaatggcatc

SEQ ID NO: 34836 - DNA, 21 bp, synthetic construct
  source 1..21: mol_type = other DNA; mol_type = other DNA
gatggctcgtcaaggagttgg

SEQ ID NO: 34837 - DNA, 21 bp, synthetic construct
  source 1..21: mol_type = other DNA; mol_type = other DNA
actaagcagaatgggaattgc

SEQ ID NO: 34838 - DNA, 21 bp, synthetic construct
  source 1..21: mol_type = other DNA; mol_type = other DNA
cgtatggatagtgttgtttgg

SEQ ID NO: 34839 - DNA, 21 bp, synthetic construct
  source 1..21: mol_type = other DNA; mol_type = other DNA
ttcactcgcttgtcaattaac

SEQ ID NO: 34840 - DNA, 21 bp, synthetic construct
  source 1..21: mol_type = other DNA; mol_type = other DNA
ccctacagccgtagcattgag

SEQ ID NO: 34841 - DNA, 21 bp, synthetic construct
  source 1..21: mol_type = other DNA; mol_type = other DNA
agaaatgatggtgtgagatgg

SEQ ID NO: 34842 - DNA, 21 bp, synthetic construct
  source 1..21: mol_type = other DNA; mol_type = other DNA
tatagcagggtagggtcccat

SEQ ID NO: 34843 - DNA, 21 bp, synthetic construct
  source 1..21: mol_type = other DNA; mol_type = other DNA
ggcgttggtggctgcaagcca

SEQ ID NO: 34844 - DNA, 21 bp, synthetic construct
  source 1..21: mol_type = other DNA; mol_type = other DNA
tacgtaaggcacgatgtacgc

SEQ ID NO: 34845 - DNA, 21 bp, synthetic construct
  source 1..21: mol_type = other DNA; mol_type = other DNA
tatttccaaggagtggttgcg

SEQ ID NO: 34846 - DNA, 21 bp, synthetic construct
  source 1..21: mol_type = other DNA; mol_type = other DNA
tatagtcgaagtgggtataat

SEQ ID NO: 34847 - DNA, 21 bp, synthetic construct
  source 1..21: mol_type = other DNA; mol_type = other DNA
tacgagcccggttgcaagcac

SEQ ID NO: 34848 - DNA, 21 bp, synthetic construct
  source 1..21: mol_type = other DNA; mol_type = other DNA
tactttcaaggcattcaggca

SEQ ID NO: 34849 - DNA, 21 bp, synthetic construct
  source 1..21: mol_type = other DNA; mol_type = other DNA
tattcgcgacataacccaaat

SEQ ID NO: 34850 - DNA, 21 bp, synthetic construct
  source 1..21: mol_type = other DNA; mol_type = other DNA
tattcacgcaataatctgaat

SEQ ID NO: 34851 - DNA, 21 bp, synthetic construct
  source 1..21: mol_type = other DNA; mol_type = other DNA
aggagtgagtttacaggtttt

SEQ ID NO: 34852 - DNA, 21 bp, synthetic construct
  source 1..21: mol_type = other DNA; mol_type = other DNA
ccggcaccaggttgtatgaaa

SEQ ID NO: 34853 - DNA, 21 bp, synthetic construct
  source 1..21: mol_type = other DNA; mol_type = other DNA
ggcagcggtacatccgtctgg

SEQ ID NO: 34854 - DNA, 21 bp, synthetic construct
  source 1..21: mol_type = other DNA; mol_type = other DNA
tatcataaaagtcagagctac

SEQ ID NO: 34855 - DNA, 21 bp, synthetic construct
  source 1..21: mol_type = other DNA; mol_type = other DNA
ataaaaagtacgaatggaatc

SEQ ID NO: 34856 - DNA, 21 bp, synthetic construct
  source 1..21: mol_type = other DNA; mol_type = other DNA
gacttaagcagcaatagctgg

SEQ ID NO: 34857 - DNA, 21 bp, synthetic construct
  source 1..21: mol_type = other DNA; mol_type = other DNA
tgtacaagcagaacaggtcat

SEQ ID NO: 34858 - DNA, 21 bp, synthetic construct
  source 1..21: mol_type = other DNA; mol_type = other DNA
tattggagtggtcaacatgaa

SEQ ID NO: 34859 - DNA, 21 bp, synthetic construct
  source 1..21: mol_type = other DNA; mol_type = other DNA
ttcaaagctggcacttggaat

SEQ ID NO: 34860 - DNA, 21 bp, synthetic construct
  source 1..21: mol_type = other DNA; mol_type = other DNA
tattcgcgccataatcacaac

SEQ ID NO: 34861 - DNA, 21 bp, synthetic construct
  source 1..21: mol_type = other DNA; mol_type = other DNA
ttctgggctggtataagggag

SEQ ID NO: 34862 - DNA, 21 bp, synthetic construct
  source 1..21: mol_type = other DNA; mol_type = other DNA
tttgcgcgtagcgggttcaat

SEQ ID NO: 34863 - DNA, 21 bp, synthetic construct
  source 1..21: mol_type = other DNA; mol_type = other DNA
tattggaccggtcaggtcgaa

SEQ ID NO: 34864 - DNA, 21 bp, synthetic construct
  source 1..21: mol_type = other DNA; mol_type = other DNA
tactggagcggcacgcgtgca

SEQ ID NO: 34865 - DNA, 21 bp, synthetic construct
  source 1..21: mol_type = other DNA; mol_type = other DNA
tatggtactggaacttggtcc

SEQ ID NO: 34866 - DNA, 21 bp, synthetic construct
  source 1..21: mol_type = other DNA; mol_type = other DNA
agctggtcaagcaatggggtc

SEQ ID NO: 34867 - DNA, 21 bp, synthetic construct
  source 1..21: mol_type = other DNA; mol_type = other DNA
tttttctccgggatgagggat

SEQ ID NO: 34868 - DNA, 21 bp, synthetic construct
  source 1..21: mol_type = other DNA
tgcaaaacagaatgcgtagcg

SEQ ID NO: 34869 - DNA, 21 bp, synthetic construct
  source 1..21: mol_type = other DNA; mol_type = other DNA
tattcgagacacggatctaac

SEQ ID NO: 34870 - DNA, 21 bp, synthetic construct
  source 1..21: mol_type = other DNA; mol_type = other DNA
tacagcaggcagaatcaaaat

SEQ ID NO: 34871 - DNA, 21 bp, synthetic construct
  source 1..21: mol_type = other DNA; mol_type = other DNA
tgcacttcggaaacggggcat

SEQ ID NO: 34872 - DNA, 21 bp, synthetic construct
  source 1..21: mol_type = other DNA; mol_type = other DNA
tatagccgaaacggccaaaac

SEQ ID NO: 34873 - DNA, 21 bp, synthetic construct
  source 1..21: mol_type = other DNA; mol_type = other DNA
aaaggggattcaagagactgg

SEQ ID NO: 34874 - DNA, 21 bp, synthetic construct
  source 1..21: mol_type = other DNA; mol_type = other DNA
atgggtgattccagcaagtgt

SEQ ID NO: 34875 - DNA, 21 bp, synthetic construct
  source 1..21: mol_type = other DNA; mol_type = other DNA
tgtttgccaggatgtttgcct

SEQ ID NO: 34876 - DNA, 21 bp, synthetic construct
  source 1..21: mol_type = other DNA; mol_type = other DNA
ggtggggagtccgttagatgg

SEQ ID NO: 34877 - DNA, 21 bp, synthetic construct
  source 1..21: mol_type = other DNA; mol_type = other DNA
aggactagtactatgggtgtc

SEQ ID NO: 34878 - DNA, 21 bp, synthetic construct
  source 1..21: mol_type = other DNA; mol_type = other DNA
tgcaaggattcagcccgtcta

SEQ ID NO: 34879 - DNA, 21 bp, synthetic construct
  source 1..21: mol_type = other DNA; mol_type = other DNA
tatttttctggcctccgagaa

SEQ ID NO: 34880 - DNA, 21 bp, synthetic construct
  source 1..21: mol_type = other DNA; mol_type = other DNA
tatgtccgcagtggcccgatg

SEQ ID NO: 34881 - DNA, 21 bp, synthetic construct
  source 1..21: mol_type = other DNA; mol_type = other DNA
tatagcaggctagatgtacta

SEQ ID NO: 34882 - DNA, 21 bp, synthetic construct
  source 1..21: mol_type = other DNA; mol_type = other DNA
aggatggactccgcggcctgg

SEQ ID NO: 34883 - DNA, 21 bp, synthetic construct
  source 1..21: mol_type = other DNA; mol_type = other DNA
tattttacaggcatgcagagt

SEQ ID NO: 34884 - DNA, 21 bp, synthetic construct
  source 1..21: mol_type = other DNA; mol_type = other DNA
tttagccgcaccggcactaat

SEQ ID NO: 34885 - DNA, 21 bp, synthetic construct
  source 1..21: mol_type = other DNA; mol_type = other DNA
tacgtccgctcgatgaacact

SEQ ID NO: 34886 - DNA, 21 bp, synthetic construct
  source 1..21: mol_type = other DNA; mol_type = other DNA
ggttccagtacgtctcattgg

SEQ ID NO: 34887 - DNA, 21 bp, synthetic construct
  source 1..21: mol_type = other DNA; mol_type = other DNA
cgatcggaaactagcagctgg

SEQ ID NO: 34888 - DNA, 21 bp, synthetic construct
  source 1..21: mol_type = other DNA; mol_type = other DNA
tattcgagaacgaatcacaac

SEQ ID NO: 34889 - DNA, 21 bp, synthetic construct
  source 1..21: mol_type = other DNA; mol_type = other DNA
gtcctcagtagcaacgtatgg

SEQ ID NO: 34890 - DNA, 21 bp, synthetic construct
  source 1..21: mol_type = other DNA; mol_type = other DNA
tactctagactcgacaacctt

SEQ ID NO: 34891 - DNA, 21 bp, synthetic construct
  source 1..21: mol_type = other DNA; mol_type = other DNA
gccggtggttcccgcgactgg

SEQ ID NO: 34892 - DNA, 21 bp, synthetic construct
  source 1..21: mol_type = other DNA; mol_type = other DNA
tggacgcccatgtgtaaggga

SEQ ID NO: 34893 - DNA, 21 bp, synthetic construct
  source 1..21: mol_type = other DNA; mol_type = other DNA
agggatggaggaagctcttgg

SEQ ID NO: 34894 - DNA, 21 bp, synthetic construct
  source 1..21: mol_type = other DNA; mol_type = other DNA
cacgaaagtagcaacggagtt

SEQ ID NO: 34895 - DNA, 21 bp, synthetic construct
  source 1..21: mol_type = other DNA; mol_type = other DNA
tatgcaagacacggcttcaac

SEQ ID NO: 34896 - DNA, 21 bp, synthetic construct
  source 1..21: mol_type = other DNA; mol_type = other DNA
atgacaggtacctcatgtgtt

SEQ ID NO: 34897 - DNA, 21 bp, synthetic construct
  source 1..21: mol_type = other DNA; mol_type = other DNA
tttgccaaaagcggattcaac

SEQ ID NO: 34898 - DNA, 21 bp, synthetic construct
  source 1..21: mol_type = other DNA; mol_type = other DNA
tactaccacggcgtccgcgat

SEQ ID NO: 34899 - DNA, 21 bp, synthetic construct
  source 1..21: mol_type = other DNA; mol_type = other DNA
gtggaatctgtcaatggaatc

SEQ ID NO: 34900 - DNA, 21 bp, synthetic construct
  source 1..21: mol_type = other DNA; mol_type = other DNA
tactttcatggtatggtggaa

SEQ ID NO: 34901 - DNA, 21 bp, synthetic construct
  source 1..21: mol_type = other DNA; mol_type = other DNA
ggcgatgagagttcagtttgg

SEQ ID NO: 34902 - DNA, 21 bp, synthetic construct
  source 1..21: mol_type = other DNA; mol_type = other DNA
tacagtcgcgtcaaccaaaat

SEQ ID NO: 34903 - DNA, 21 bp, synthetic construct
  source 1..21: mol_type = other DNA; mol_type = other DNA
agagatgcggtgtccaggtgg

SEQ ID NO: 34904 - DNA, 21 bp, synthetic construct
  source 1..21: mol_type = other DNA; mol_type = other DNA
atagacgagtggaagggatgg

SEQ ID NO: 34905 - DNA, 21 bp, synthetic construct
  source 1..21: mol_type = other DNA; mol_type = other DNA
acccgatggggtgacaacgct

SEQ ID NO: 34906 - DNA, 21 bp, synthetic construct
  source 1..21: mol_type = other DNA; mol_type = other DNA
tattttagtgggatgaccagt

SEQ ID NO: 34907 - DNA, 21 bp, synthetic construct
  source 1..21: mol_type = other DNA; mol_type = other DNA
tacagcaaacataacacaaac

SEQ ID NO: 34908 - DNA, 21 bp, synthetic construct
  source 1..21: mol_type = other DNA; mol_type = other DNA
tactggagtggcatccataat

SEQ ID NO: 34909 - DNA, 21 bp, synthetic construct
  source 1..21: mol_type = other DNA; mol_type = other DNA
agacaggaaggagtgaggtgg

SEQ ID NO: 34910 - DNA, 21 bp, synthetic construct
  source 1..21: mol_type = other DNA; mol_type = other DNA
tactggcaaggcatgcgcgag

SEQ ID NO: 34911 - DNA, 21 bp, synthetic construct
  source 1..21: mol_type = other DNA; mol_type = other DNA
ccaggtagcacgaatggcgtc

SEQ ID NO: 34912 - DNA, 21 bp, synthetic construct
  source 1..21: mol_type = other DNA; mol_type = other DNA
ggcggggagacatccttgtgg

SEQ ID NO: 34913 - DNA, 21 bp, synthetic construct
  source 1..21: mol_type = other DNA; mol_type = other DNA
tgtaagccaagcccactagaa

SEQ ID NO: 34914 - DNA, 21 bp, synthetic construct
  source 1..21: mol_type = other DNA; mol_type = other DNA
ctccataagtccacctgtgac

SEQ ID NO: 34915 - DNA, 21 bp, synthetic construct
  source 1..21: mol_type = other DNA; mol_type = other DNA
tggttttccggtcagcgcgac

SEQ ID NO: 34916 - DNA, 21 bp, synthetic construct
  source 1..21: mol_type = other DNA; mol_type = other DNA
tacagcaaagggaattggaat

SEQ ID NO: 34917 - DNA, 21 bp, synthetic construct
  source 1..21: mol_type = other DNA; mol_type = other DNA
ttctccaagttaggatttaac

SEQ ID NO: 34918 - DNA, 21 bp, synthetic construct
  source 1..21: mol_type = other DNA; mol_type = other DNA
tattttgcgggagttcttagt

SEQ ID NO: 34919 - DNA, 21 bp, synthetic construct
  source 1..21: mol_type = other DNA; mol_type = other DNA
gggtgcggaacgaaaggtggc

SEQ ID NO: 34920 - DNA, 21 bp, synthetic construct
  source 1..21: mol_type = other DNA; mol_type = other DNA
tattggtcggggcaggtgagt

SEQ ID NO: 34921 - DNA, 21 bp, synthetic construct
  source 1..21: mol_type = other DNA; mol_type = other DNA
tactcgcgaaataactacaat

SEQ ID NO: 34922 - DNA, 21 bp, synthetic construct
  source 1..21: mol_type = other DNA; mol_type = other DNA
tgcaaggcgccggacaaggga

SEQ ID NO: 34923 - DNA, 21 bp, synthetic construct
  source 1..21: mol_type = other DNA; mol_type = other DNA
ttatggaatgggactccaagc

SEQ ID NO: 34924 - DNA, 21 bp, synthetic construct
  source 1..21: mol_type = other DNA; mol_type = other DNA
ggaggccccaccagtgcgtgg

SEQ ID NO: 34925 - DNA, 21 bp, synthetic construct
  source 1..21: mol_type = other DNA; mol_type = other DNA
aagaatggttatagtagctat

SEQ ID NO: 34926 - DNA, 21 bp, synthetic construct
  source 1..21: mol_type = other DNA; mol_type = other DNA
tactcgcgccagaaccagaac

SEQ ID NO: 34927 - DNA, 21 bp, synthetic construct
  source 1..21: mol_type = other DNA; mol_type = other DNA
cgcgacggcagctgcaaggct

SEQ ID NO: 34928 - DNA, 21 bp, synthetic construct
  source 1..21: mol_type = other DNA; mol_type = other DNA
gaccacaagggacaaattgct

SEQ ID NO: 34929 - DNA, 21 bp, synthetic construct
  source 1..21: mol_type = other DNA; mol_type = other DNA
aaaaacggtacaagtagttgg

SEQ ID NO: 34930 - DNA, 21 bp, synthetic construct
  source 1..21: mol_type = other DNA; mol_type = other DNA
gaaatggagtcatccatatgg

SEQ ID NO: 34931 - DNA, 21 bp, synthetic construct
  source 1..21: mol_type = other DNA; mol_type = other DNA
tattgggaggggacacgccac

SEQ ID NO: 34932 - DNA, 21 bp, synthetic construct
  source 1..21: mol_type = other DNA; mol_type = other DNA
ttggcgaagaatggcattaat

SEQ ID NO: 34933 - DNA, 21 bp, synthetic construct
  source 1..21: mol_type = other DNA; mol_type = other DNA
gatttaaagtcggtcaagtgg

SEQ ID NO: 34934 - DNA, 21 bp, synthetic construct
  source 1..21: mol_type = other DNA; mol_type = other DNA
gtgagcacgcattgcagcgca

SEQ ID NO: 34935 - DNA, 21 bp, synthetic construct
  source 1..21: mol_type = other DNA; mol_type = other DNA
tgtaaggataccaagacagta

SEQ ID NO: 34936 - DNA, 21 bp, synthetic construct
  source 1..21: mol_type = other DNA; mol_type = other DNA
tgctactcaaagactggacat

SEQ ID NO: 34937 - DNA, 21 bp, synthetic construct
  source 1..21: mol_type = other DNA; mol_type = other DNA
tattggtctagtgttagggat

SEQ ID NO: 34938 - DNA, 21 bp, synthetic construct
  source 1..21: mol_type = other DNA; mol_type = other DNA
aagaacgattatataacctat

SEQ ID NO: 34939 - DNA, 21 bp, synthetic construct
  source 1..21: mol_type = other DNA; mol_type = other DNA
actcactcctcaaacggagtt

SEQ ID NO: 34940 - DNA, 21 bp, synthetic construct
  source 1..21: mol_type = other DNA; mol_type = other DNA
tattcgagaacgaatgccaac

SEQ ID NO: 34941 - DNA, 21 bp, synthetic construct
  source 1..21: mol_type = other DNA; mol_type = other DNA
tacagccgtgggaacaacaac

SEQ ID NO: 34942 - DNA, 21 bp, synthetic construct
  source 1..21: mol_type = other DNA; mol_type = other DNA
ctttttaaagagtgtggagga

SEQ ID NO: 34943 - DNA, 21 bp, synthetic construct
  source 1..21: mol_type = other DNA; mol_type = other DNA
tacagtagaatgaatttcaac

SEQ ID NO: 34944 - DNA, 21 bp, synthetic construct
  source 1..21: mol_type = other DNA; mol_type = other DNA
tacagcaagcagggcaccaat

SEQ ID NO: 34945 - DNA, 21 bp, synthetic construct
  source 1..21: mol_type = other DNA; mol_type = other DNA
tttttctcaggaattgtcggt

SEQ ID NO: 34946 - DNA, 21 bp, synthetic construct
  source 1..21: mol_type = other DNA; mol_type = other DNA
tactttacagggtcaagaagt

SEQ ID NO: 34947 - DNA, 21 bp, synthetic construct
  source 1..21: mol_type = other DNA; mol_type = other DNA
tattatacagggaaatgtgaa

SEQ ID NO: 34948 - DNA, 21 bp, synthetic construct
  source 1..21: mol_type = other DNA; mol_type = other DNA
cattggtctaccaatgggata

SEQ ID NO: 34949 - DNA, 21 bp, synthetic construct
  source 1..21: mol_type = other DNA; mol_type = other DNA
cgagacggcggctcgagctgg

SEQ ID NO: 34950 - DNA, 21 bp, synthetic construct
  source 1..21: mol_type = other DNA
tactttcaaggaattcaagcc

SEQ ID NO: 34951 - DNA, 21 bp, synthetic construct
  source 1..21: mol_type = other DNA; mol_type = other DNA
tacagccgtcacgggttaaac

SEQ ID NO: 34952 - DNA, 21 bp, synthetic construct
  source 1..21: mol_type = other DNA; mol_type = other DNA
aaaaacggctactcctcttac

SEQ ID NO: 34953 - DNA, 21 bp, synthetic construct
  source 1..21: mol_type = other DNA
ttctggagcggtaagattgat

SEQ ID NO: 34954 - DNA, 21 bp, synthetic construct
  source 1..21: mol_type = other DNA
ggcagcgaattcgaccattgg

SEQ ID NO: 34955 - DNA, 21 bp, synthetic construct
  source 1..21: mol_type = other DNA
tatttcacgggaagccgttcg

SEQ ID NO: 34956 - DNA, 21 bp, synthetic construct
  source 1..21: mol_type = other DNA
attggtatgaaaggatgggac

SEQ ID NO: 34957 - DNA, 21 bp, synthetic construct
  source 1..21: mol_type = other DNA
gaaatggagtccgtgaggtgg

SEQ ID NO: 34958 - DNA, 21 bp, synthetic construct
  source 1..21: mol_type = other DNA
ggagcggccaccagcaaatgg

SEQ ID NO: 34959 - DNA, 21 bp, synthetic construct
  source 1..21: mol_type = other DNA
taccattcaacaaatggaata

SEQ ID NO: 34960 - DNA, 21 bp, synthetic construct
  source 1..21: mol_type = other DNA; mol_type = other DNA
cactggtcaagtaatggcgtg

SEQ ID NO: 34961 - DNA, 21 bp, synthetic construct
  source 1..21: mol_type = other DNA; mol_type = other DNA
aaagatgggttctctacctat

SEQ ID NO: 34962 - DNA, 21 bp, synthetic construct
  source 1..21: mol_type = other DNA; mol_type = other DNA
tgcgatgggtccgctaaagca

SEQ ID NO: 34963 - DNA, 21 bp, synthetic construct
  source 1..21: mol_type = other DNA; mol_type = other DNA
tattatagcggagtcaccgca

SEQ ID NO: 34964 - DNA, 21 bp, synthetic construct
  source 1..21: mol_type = other DNA; mol_type = other DNA
tgtaagaaatatgggggtgac

SEQ ID NO: 34965 - DNA, 21 bp, synthetic construct
  source 1..21: mol_type = other DNA; mol_type = other DNA
cgaggcgggcaaagtacttgg

SEQ ID NO: 34966 - DNA, 21 bp, synthetic construct
  source 1..21: mol_type = other DNA; mol_type = other DNA
ggtggcggcacctcgaagtgg

SEQ ID NO: 34967 - DNA, 21 bp, synthetic construct
  source 1..21: mol_type = other DNA; mol_type = other DNA
catgatagtagtaacggcgtt

SEQ ID NO: 34968 - DNA, 21 bp, synthetic construct
  source 1..21: mol_type = other DNA; mol_type = other DNA
ttcgctaagtcaggttttaat

SEQ ID NO: 34969 - DNA, 21 bp, synthetic construct
  source 1..21: mol_type = other DNA; mol_type = other DNA
tacagcaggaacaatctaaac

SEQ ID NO: 34970 - DNA, 21 bp, synthetic construct
  source 1..21: mol_type = other DNA; mol_type = other DNA
tttagccgtctcggcatgaat

SEQ ID NO: 34971 - DNA, 21 bp, synthetic construct
  source 1..21: mol_type = other DNA; mol_type = other DNA
acctgggacgggtatgatgct

SEQ ID NO: 34972 - DNA, 21 bp, synthetic construct
  source 1..21: mol_type = other DNA; mol_type = other DNA
tattcgcggggtaactacaat

SEQ ID NO: 34973 - DNA, 21 bp, synthetic construct
  source 1..21: mol_type = other DNA; mol_type = other DNA
atgagatccaccaatggggtt

SEQ ID NO: 34974 - DNA, 21 bp, synthetic construct
  source 1..21: mol_type = other DNA; mol_type = other DNA
tacgcacgaggtggcgtcaat

SEQ ID NO: 34975 - DNA, 21 bp, synthetic construct
  source 1..21: mol_type = other DNA; mol_type = other DNA
acgtactcgggagacccggcg

SEQ ID NO: 34976 - DNA, 21 bp, synthetic construct
  source 1..21: mol_type = other DNA; mol_type = other DNA
tgcaaaggaagcggtgagcag

SEQ ID NO: 34977 - DNA, 21 bp, synthetic construct
  source 1..21: mol_type = other DNA; mol_type = other DNA
cgcggagactcatcaaggtgg

SEQ ID NO: 34978 - DNA, 21 bp, synthetic construct
  source 1..21: mol_type = other DNA; mol_type = other DNA
ctatggtcaggagtaggcccc

SEQ ID NO: 34979 - DNA, 21 bp, synthetic construct
  source 1..21: mol_type = other DNA; mol_type = other DNA
atcggtgccttaggttgggat

SEQ ID NO: 34980 - DNA, 21 bp, synthetic construct
  source 1..21: mol_type = other DNA; mol_type = other DNA
tacgtccgttttgattcaggc

SEQ ID NO: 34981 - DNA, 21 bp, synthetic construct
  source 1..21: mol_type = other DNA; mol_type = other DNA
tattggcaggggacggtagcg

SEQ ID NO: 34982 - DNA, 21 bp, synthetic construct
  source 1..21: mol_type = other DNA; mol_type = other DNA
ggcatggaacacgtcagatgg

SEQ ID NO: 34983 - DNA, 21 bp, synthetic construct
  source 1..21: mol_type = other DNA; mol_type = other DNA
gggggcgagacctctgtttgg

SEQ ID NO: 34984 - DNA, 21 bp, synthetic construct
  source 1..21: mol_type = other DNA; mol_type = other DNA
ctatgggacggcacaagagca

SEQ ID NO: 34985 - DNA, 21 bp, synthetic construct
  source 1..21: mol_type = other DNA; mol_type = other DNA
ccatattcgcggtcgatagaa

SEQ ID NO: 34986 - DNA, 21 bp, synthetic construct
  source 1..21: mol_type = other DNA; mol_type = other DNA
tacagccggcatggggccaat

SEQ ID NO: 34987 - DNA, 21 bp, synthetic construct
  source 1..21: mol_type = other DNA; mol_type = other DNA
tttgctcggaatggcttcaac

SEQ ID NO: 34988 - DNA, 21 bp, synthetic construct
  source 1..21: mol_type = other DNA; mol_type = other DNA
tggactagttcgaacggagtg

SEQ ID NO: 34989 - DNA, 21 bp, synthetic construct
  source 1..21: mol_type = other DNA; mol_type = other DNA
caaggcaacgggttgtacaga

SEQ ID NO: 34990 - DNA, 21 bp, synthetic construct
  source 1..21: mol_type = other DNA; mol_type = other DNA
cgtgatgacttttcgccttac

SEQ ID NO: 34991 - DNA, 21 bp, synthetic construct
  source 1..21: mol_type = other DNA; mol_type = other DNA
tactacacgggccacccgaac

SEQ ID NO: 34992 - DNA, 21 bp, synthetic construct
  source 1..21: mol_type = other DNA; mol_type = other DNA
ggcggcagtggcagttcctgg

SEQ ID NO: 34993 - DNA, 21 bp, synthetic construct
  source 1..21: mol_type = other DNA; mol_type = other DNA
cgtgacgccgttagctcctgg

SEQ ID NO: 34994 - DNA, 21 bp, synthetic construct
  source 1..21: mol_type = other DNA; mol_type = other DNA
cgcgacgccgcgagttcgtgg

SEQ ID NO: 34995 - DNA, 21 bp, synthetic construct
  source 1..21: mol_type = other DNA; mol_type = other DNA
tattcgagactctccgctatt

SEQ ID NO: 34996 - DNA, 21 bp, synthetic construct
  source 1..21: mol_type = other DNA; mol_type = other DNA
tacttcagtggtcgctccctt

SEQ ID NO: 34997 - DNA, 21 bp, synthetic construct
  source 1..21: mol_type = other DNA; mol_type = other DNA
gatcataaagggcagatcgcc

SEQ ID NO: 34998 - DNA, 21 bp, synthetic construct
  source 1..21: mol_type = other DNA; mol_type = other DNA
ggttgcgacttcagacctgaa

SEQ ID NO: 34999 - DNA, 21 bp, synthetic construct
  source 1..21: mol_type = other DNA; mol_type = other DNA
cgaagcgagttcacgcctttc

SEQ ID NO: 35000 - DNA, 21 bp, synthetic construct
  source 1..21: mol_type = other DNA; mol_type = other DNA
tacagcaagaccaactgtaat

SEQ ID NO: 35001 - DNA, 21 bp, synthetic construct
  source 1..21: mol_type = other DNA; mol_type = other DNA
tttagcagaatgaacttaaac

SEQ ID NO: 35002 - DNA, 21 bp, synthetic construct
  source 1..21: mol_type = other DNA; mol_type = other DNA
acttggagctctaacggtgtc

SEQ ID NO: 35003 - DNA, 21 bp, synthetic construct
  source 1..21: mol_type = other DNA; mol_type = other DNA
agctacgatgggactgccgcc

SEQ ID NO: 35004 - DNA, 21 bp, synthetic construct
  source 1..21: mol_type = other DNA; mol_type = other DNA
cgggactcggataacggtatc

SEQ ID NO: 35005 - DNA, 21 bp, synthetic construct
  source 1..21: mol_type = other DNA; mol_type = other DNA
tattcgcgcgcgaatgggaat

SEQ ID NO: 35006 - DNA, 21 bp, synthetic construct
  source 1..21: mol_type = other DNA; mol_type = other DNA
tactggcatgggaaacccgat

SEQ ID NO: 35007 - DNA, 21 bp, synthetic construct
  source 1..21: mol_type = other DNA; mol_type = other DNA
ttccacagtacgaacgggatt

SEQ ID NO: 35008 - DNA, 21 bp, synthetic construct
  source 1..21: mol_type = other DNA; mol_type = other DNA
ctaagcaaggctaatttcaat

SEQ ID NO: 35009 - DNA, 21 bp, synthetic construct
  source 1..21: mol_type = other DNA; mol_type = other DNA
tatgatggcggaaaaccttgt

SEQ ID NO: 35010 - DNA, 21 bp, synthetic construct
  source 1..21: mol_type = other DNA; mol_type = other DNA
tatagtaggcaaggttacaat

SEQ ID NO: 35011 - DNA, 21 bp, synthetic construct
  source 1..21: mol_type = other DNA; mol_type = other DNA
ggctccgagaacgtccggtgg

SEQ ID NO: 35012 - DNA, 21 bp, synthetic construct
  source 1..21: mol_type = other DNA; mol_type = other DNA
tactggagtaaagtggctgat

SEQ ID NO: 35013 - DNA, 21 bp, synthetic construct
  source 1..21: mol_type = other DNA; mol_type = other DNA
gtcccggactacgtccgctat

SEQ ID NO: 35014 - DNA, 21 bp, synthetic construct
  source 1..21: mol_type = other DNA; mol_type = other DNA
cgtacctatgataccgtagtt

SEQ ID NO: 35015 - DNA, 21 bp, synthetic construct
  source 1..21: mol_type = other DNA; mol_type = other DNA
aaaaccgggaatgaaggctgc

SEQ ID NO: 35016 - DNA, 21 bp, synthetic construct
  source 1..21: mol_type = other DNA; mol_type = other DNA
aattgggctagaagcctggaa

SEQ ID NO: 35017 - DNA, 21 bp, synthetic construct
  source 1..21: mol_type = other DNA; mol_type = other DNA
gtttgcatgccgcaaaagcca

SEQ ID NO: 35018 - DNA, 21 bp, synthetic construct
  source 1..21: mol_type = other DNA; mol_type = other DNA
ctctatgacggagacgggccg

SEQ ID NO: 35019 - DNA, 21 bp, synthetic construct
  source 1..21: mol_type = other DNA; mol_type = other DNA
aaaaatggcacatctgcgtgg

SEQ ID NO: 35020 - DNA, 21 bp, synthetic construct
  source 1..21: mol_type = other DNA; mol_type = other DNA
cagaattcgacgaacggtcgt

SEQ ID NO: 35021 - DNA, 21 bp, synthetic construct
  source 1..21: mol_type = other DNA; mol_type = other DNA
cgtaacggagcctcatcgtgg

SEQ ID NO: 35022 - DNA, 21 bp, synthetic construct
  source 1..21: mol_type = other DNA; mol_type = other DNA
aggagcgaatttacgtccttt

SEQ ID NO: 35023 - DNA, 21 bp, synthetic construct
  source 1..21: mol_type = other DNA; mol_type = other DNA
tgcaaggtgcccaaaatgcct

SEQ ID NO: 35024 - DNA, 21 bp, synthetic construct
  source 1..21: mol_type = other DNA; mol_type = other DNA
aggacatacgacactgtggtg

SEQ ID NO: 35025 - DNA, 21 bp, synthetic construct
  source 1..21: mol_type = other DNA; mol_type = other DNA
tacagccgggcagggggtagt

SEQ ID NO: 35026 - DNA, 21 bp, synthetic construct
  source 1..21: mol_type = other DNA; mol_type = other DNA
cttatcagcggcgatgggcct

SEQ ID NO: 35027 - DNA, 21 bp, synthetic construct
  source 1..21: mol_type = other DNA; mol_type = other DNA
tatagcaggtctaacagtaac

SEQ ID NO: 35028 - DNA, 21 bp, synthetic construct
  source 1..21: mol_type = other DNA; mol_type = other DNA
agagatgaatttcgcagttat

SEQ ID NO: 35029 - DNA, 21 bp, synthetic construct
  source 1..21: mol_type = other DNA; mol_type = other DNA
tacgctagaggtaatttaaat

SEQ ID NO: 35030 - DNA, 21 bp, synthetic construct
  source 1..21: mol_type = other DNA; mol_type = other DNA
tggttctcgggtaggcatgcc

SEQ ID NO: 35031 - DNA, 21 bp, synthetic construct
  source 1..21: mol_type = other DNA; mol_type = other DNA
tatcaaagacagggttgggat

SEQ ID NO: 35032 - DNA, 21 bp, synthetic construct
  source 1..21: mol_type = other DNA; mol_type = other DNA
tattcgagaattgacaataat

SEQ ID NO: 35033 - DNA, 21 bp, synthetic construct
  source 1..21: mol_type = other DNA; mol_type = other DNA
ggtgttaatcaggtcaggtgg

SEQ ID NO: 35034 - DNA, 21 bp, synthetic construct
  source 1..21: mol_type = other DNA; mol_type = other DNA
cgtaacgaatttacagcctac

SEQ ID NO: 35035 - DNA, 21 bp, synthetic construct
  source 1..21: mol_type = other DNA; mol_type = other DNA
ggcagcggaacctccgcctgg

SEQ ID NO: 35036 - DNA, 21 bp, synthetic construct
  source 1..21: mol_type = other DNA; mol_type = other DNA
tgccgcgttgagaaacctcca

SEQ ID NO: 35037 - DNA, 21 bp, synthetic construct
  source 1..21: mol_type = other DNA; mol_type = other DNA
agaggagagggtgtgcgctgg

SEQ ID NO: 35038 - DNA, 21 bp, synthetic construct
  source 1..21: mol_type = other DNA; mol_type = other DNA
ggaagtgaacatgtgcgttgg

SEQ ID NO: 35039 - DNA, 21 bp, synthetic construct
  source 1..21: mol_type = other DNA; mol_type = other DNA
agaggggaattcagcacttgg

SEQ ID NO: 35040 - DNA, 21 bp, synthetic construct
  source 1..21: mol_type = other DNA; mol_type = other DNA
tactcgcggaccaacaataac

SEQ ID NO: 35041 - DNA, 21 bp, synthetic construct
  source 1..21: mol_type = other DNA; mol_type = other DNA
actagggaaggagatccacct

SEQ ID NO: 35042 - DNA, 21 bp, synthetic construct
  source 1..21: mol_type = other DNA; mol_type = other DNA
tattttagtggcgtcttgaca

SEQ ID NO: 35043 - DNA, 21 bp, synthetic construct
  source 1..21: mol_type = other DNA; mol_type = other DNA
gagatggctgcttacgattgg

SEQ ID NO: 35044 - DNA, 21 bp, synthetic construct
  source 1..21: mol_type = other DNA; mol_type = other DNA
aaggaggattacgtgacgtat

SEQ ID NO: 35045 - DNA, 21 bp, synthetic construct
  source 1..21: mol_type = other DNA; mol_type = other DNA
ggaggtgaaacaagcgtctgg

SEQ ID NO: 35046 - DNA, 21 bp, synthetic construct
  source 1..21: mol_type = other DNA; mol_type = other DNA
gccggggagtgggtaacgtac

SEQ ID NO: 35047 - DNA, 21 bp, synthetic construct
  source 1..21: mol_type = other DNA; mol_type = other DNA
ttctttgcagggatacgtgaa

SEQ ID NO: 35048 - DNA, 21 bp, synthetic construct
  source 1..21: mol_type = other DNA; mol_type = other DNA
tatttccatggagtgacggag

SEQ ID NO: 35049 - DNA, 21 bp, synthetic construct
  source 1..21: mol_type = other DNA; mol_type = other DNA
tcggatggtgtcagtgcgtgg

SEQ ID NO: 35050 - DNA, 21 bp, synthetic construct
  source 1..21: mol_type = other DNA; mol_type = other DNA
gatctagggtcatcggtgtgg

SEQ ID NO: 35051 - DNA, 21 bp, synthetic construct
  source 1..21: mol_type = other DNA; mol_type = other DNA
tactacagtggtgtcaagtac

SEQ ID NO: 35052 - DNA, 21 bp, synthetic construct
  source 1..21: mol_type = other DNA; mol_type = other DNA
cgcagcgagtacactgtttac

SEQ ID NO: 35053 - DNA, 21 bp, synthetic construct
  source 1..21: mol_type = other DNA; mol_type = other DNA
taccataggttgggcgagccg

SEQ ID NO: 35054 - DNA, 21 bp, synthetic construct
  source 1..21: mol_type = other DNA; mol_type = other DNA
tatgcacggggaaataacaac

SEQ ID NO: 35055 - DNA, 21 bp, synthetic construct
  source 1..21: mol_type = other DNA; mol_type = other DNA
ttttggcacggcgtaccggac

SEQ ID NO: 35056 - DNA, 21 bp, synthetic construct
  source 1..21: mol_type = other DNA; mol_type = other DNA
tgcacgacaaagactggtcat

SEQ ID NO: 35057 - DNA, 21 bp, synthetic construct
  source 1..21: mol_type = other DNA; mol_type = other DNA
aaggacgactatgtcccttgg

SEQ ID NO: 35058 - DNA, 21 bp, synthetic construct
  source 1..21: mol_type = other DNA; mol_type = other DNA
tattggacagggatgccagaa

SEQ ID NO: 35059 - DNA, 21 bp, synthetic construct
  source 1..21: mol_type = other DNA; mol_type = other DNA
ttgtggaagaccggacataac

SEQ ID NO: 35060 - DNA, 21 bp, synthetic construct
  source 1..21: mol_type = other DNA; mol_type = other DNA
tacagtaagtatggtaacaat

SEQ ID NO: 35061 - DNA, 21 bp, synthetic construct
  source 1..21: mol_type = other DNA; mol_type = other DNA
aggggtgaatttgtatcatgg

SEQ ID NO: 35062 - DNA, 21 bp, synthetic construct
  source 1..21: mol_type = other DNA; mol_type = other DNA
ggtggggctggaagccactgg

SEQ ID NO: 35063 - DNA, 21 bp, synthetic construct
  source 1..21: mol_type = other DNA; mol_type = other DNA
gttgaaccaggctgtaaagaa

SEQ ID NO: 35064 - DNA, 21 bp, synthetic construct
  source 1..21: mol_type = other DNA; mol_type = other DNA
aaggacggatcaagctattgg

SEQ ID NO: 35065 - DNA, 21 bp, synthetic construct
  source 1..21: mol_type = other DNA; mol_type = other DNA
agaggagattaccaggttttc

SEQ ID NO: 35066 - DNA, 21 bp, synthetic construct
  source 1..21: mol_type = other DNA; mol_type = other DNA
tatgcgaaggtcggctggaac

SEQ ID NO: 35067 - DNA, 21 bp, synthetic construct
  source 1..21: mol_type = other DNA; mol_type = other DNA
ttgcacaaatcaacttgcgat

SEQ ID NO: 35068 - DNA, 21 bp, synthetic construct
  source 1..21: mol_type = other DNA; mol_type = other DNA
agaaactttgacgcatacccc

SEQ ID NO: 35069 - DNA, 21 bp, synthetic construct
  source 1..21: mol_type = other DNA; mol_type = other DNA
tacagcagacataacatgaat

SEQ ID NO: 35070 - DNA, 21 bp, synthetic construct
  source 1..21: mol_type = other DNA; mol_type = other DNA
tttgcaaaatcgggatggaac

SEQ ID NO: 35071 - DNA, 21 bp, synthetic construct
  source 1..21: mol_type = other DNA; mol_type = other DNA
tatttttctgggatgcgcagc

SEQ ID NO: 35072 - DNA, 21 bp, synthetic construct
  source 1..21: mol_type = other DNA; mol_type = other DNA
tacgactcaacaaatgggata

SEQ ID NO: 35073 - DNA, 21 bp, synthetic construct
  source 1..21: mol_type = other DNA; mol_type = other DNA
tactggcagggtatgttggat

SEQ ID NO: 35074 - DNA, 21 bp, synthetic construct
  source 1..21: mol_type = other DNA; mol_type = other DNA
ggtggaggcactagtaagtgg

SEQ ID NO: 35075 - DNA, 21 bp, synthetic construct
  source 1..21: mol_type = other DNA; mol_type = other DNA
aaagacgagttccagacgtac

SEQ ID NO: 35076 - DNA, 21 bp, synthetic construct
  source 1..21: mol_type = other DNA; mol_type = other DNA
aggttagatcatgtgttccct

SEQ ID NO: 35077 - DNA, 21 bp, synthetic construct
  source 1..21: mol_type = other DNA; mol_type = other DNA
aaagatggtgttagtaaatgg

SEQ ID NO: 35078 - DNA, 21 bp, synthetic construct
  source 1..21: mol_type = other DNA; mol_type = other DNA
tactggagtggtcaacatgcc

SEQ ID NO: 35079 - DNA, 21 bp, synthetic construct
  source 1..21: mol_type = other DNA; mol_type = other DNA
ccgcatcctaagtgtccgttt

SEQ ID NO: 35080 - DNA, 21 bp, synthetic construct
  source 1..21: mol_type = other DNA; mol_type = other DNA
tactcccgtcaaggctataac

SEQ ID NO: 35081 - DNA, 21 bp, synthetic construct
  source 1..21: mol_type = other DNA; mol_type = other DNA
tacgccaggcatggcatgaac

SEQ ID NO: 35082 - DNA, 21 bp, synthetic construct
  source 1..21: mol_type = other DNA; mol_type = other DNA
tacgtaaggagtatgaacacg

SEQ ID NO: 35083 - DNA, 21 bp, synthetic construct
  source 1..21: mol_type = other DNA; mol_type = other DNA
ggttcgccaggctccgcctgg

SEQ ID NO: 35084 - DNA, 21 bp, synthetic construct
  source 1..21: mol_type = other DNA; mol_type = other DNA
agggatgagttcatgcattac

SEQ ID NO: 35085 - DNA, 21 bp, synthetic construct
  source 1..21: mol_type = other DNA; mol_type = other DNA
tacttttcaggaaccatcacg

SEQ ID NO: 35086 - DNA, 21 bp, synthetic construct
  source 1..21: mol_type = other DNA; mol_type = other DNA
agggaggacacgagttattgg

SEQ ID NO: 35087 - DNA, 21 bp, synthetic construct
  source 1..21: mol_type = other DNA; mol_type = other DNA
tactcaaaatacgggcttaac

SEQ ID NO: 35088 - DNA, 21 bp, synthetic construct
  source 1..21: mol_type = other DNA; mol_type = other DNA
ggaggcgagttcgttcactgg

SEQ ID NO: 35089 - DNA, 21 bp, synthetic construct
  source 1..21: mol_type = other DNA; mol_type = other DNA
taccacaggacagggaataac

SEQ ID NO: 35090 - DNA, 21 bp, synthetic construct
  source 1..21: mol_type = other DNA; mol_type = other DNA
tatagcagaaacaatgtaaac

SEQ ID NO: 35091 - DNA, 21 bp, synthetic construct
  source 1..21: mol_type = other DNA; mol_type = other DNA
gggtcggaattcataacgttc

SEQ ID NO: 35092 - DNA, 21 bp, synthetic construct
  source 1..21: mol_type = other DNA; mol_type = other DNA
ggcgaggagggagttcgctgg

SEQ ID NO: 35093 - DNA, 21 bp, synthetic construct
  source 1..21: mol_type = other DNA; mol_type = other DNA
tgcaattctaaaactgggcac

SEQ ID NO: 35094 - DNA, 21 bp, synthetic construct
  source 1..21: mol_type = other DNA; mol_type = other DNA
ttggctaggggaggctgggat

SEQ ID NO: 35095 - DNA, 21 bp, synthetic construct
  source 1..21: mol_type = other DNA; mol_type = other DNA
atagagtcctcacggtcgtgg

SEQ ID NO: 35096 - DNA, 21 bp, synthetic construct
  source 1..21: mol_type = other DNA; mol_type = other DNA
taccaccgaaattcagataac

SEQ ID NO: 35097 - DNA, 21 bp, synthetic construct
  source 1..21: mol_type = other DNA; mol_type = other DNA
tactacagcggcatgcgtgac

SEQ ID NO: 35098 - DNA, 21 bp, synthetic construct
  source 1..21: mol_type = other DNA; mol_type = other DNA
gaccttaatagtagaggctgg

SEQ ID NO: 35099 - DNA, 21 bp, synthetic construct
  source 1..21: mol_type = other DNA; mol_type = other DNA
cgtggggaaggcgtaaggtgg

SEQ ID NO: 35100 - DNA, 21 bp, synthetic construct
  source 1..21: mol_type = other DNA; mol_type = other DNA
cgcgatgctttcgtatcgtac

SEQ ID NO: 35101 - DNA, 21 bp, synthetic construct
  source 1..21: mol_type = other DNA; mol_type = other DNA
gatatgagcagcgttgcatgg

SEQ ID NO: 35102 - DNA, 21 bp, synthetic construct
  source 1..21: mol_type = other DNA; mol_type = other DNA
tattattcagggcagcgtgct

SEQ ID NO: 35103 - DNA, 21 bp, synthetic construct
  source 1..21: mol_type = other DNA; mol_type = other DNA
ggtgctggtacctcgcattgg

SEQ ID NO: 35104 - DNA, 21 bp, synthetic construct
  source 1..21: mol_type = other DNA; mol_type = other DNA
tatgtcaggtcgcaagacttt

SEQ ID NO: 35105 - DNA, 21 bp, synthetic construct
  source 1..21: mol_type = other DNA; mol_type = other DNA
aagaatgattacgctacgtgg

SEQ ID NO: 35106 - DNA, 21 bp, synthetic construct
  source 1..21: mol_type = other DNA; mol_type = other DNA
cgcgaatcaaccaacggcaga

SEQ ID NO: 35107 - DNA, 21 bp, synthetic construct
  source 1..21: mol_type = other DNA; mol_type = other DNA
agggaggagacaaggtactgg

SEQ ID NO: 35108 - DNA, 21 bp, synthetic construct
  source 1..21: mol_type = other DNA; mol_type = other DNA
tgtggaaagccaatgaccgct

SEQ ID NO: 35109 - DNA, 21 bp, synthetic construct
  source 1..21: mol_type = other DNA; mol_type = other DNA
tattacagcggaacccgggct

SEQ ID NO: 35110 - DNA, 21 bp, synthetic construct
  source 1..21: mol_type = other DNA; mol_type = other DNA
tacttttcggggaccattgtt

SEQ ID NO: 35111 - DNA, 21 bp, synthetic construct
  source 1..21: mol_type = other DNA; mol_type = other DNA
agttcaccaggagtaagatgg

SEQ ID NO: 35112 - DNA, 21 bp, synthetic construct
  source 1..21: mol_type = other DNA; mol_type = other DNA
tattatacgggatataaggaa

SEQ ID NO: 35113 - DNA, 21 bp, synthetic construct
  source 1..21: mol_type = other DNA; mol_type = other DNA
gtgatgtcagacaatggtata

SEQ ID NO: 35114 - DNA, 21 bp, synthetic construct
  source 1..21: mol_type = other DNA; mol_type = other DNA
aggtcagaatttacccccttt

SEQ ID NO: 35115 - DNA, 21 bp, synthetic construct
  source 1..21: mol_type = other DNA; mol_type = other DNA
cggggtgaatttaccgtatgg

SEQ ID NO: 35116 - DNA, 21 bp, synthetic construct
  source 1..21: mol_type = other DNA; mol_type = other DNA
tggtggtctgggtacgttgag

SEQ ID NO: 35117 - DNA, 21 bp, synthetic construct
  source 1..21: mol_type = other DNA; mol_type = other DNA
tactggcaaggtgtagtagat

SEQ ID NO: 35118 - DNA, 21 bp, synthetic construct
  source 1..21: mol_type = other DNA; mol_type = other DNA
gggggcgaatcagtcagatgg

SEQ ID NO: 35119 - DNA, 21 bp, synthetic construct
  source 1..21: mol_type = other DNA; mol_type = other DNA
tattggagtcatattaaggat

SEQ ID NO: 35120 - DNA, 21 bp, synthetic construct
  source 1..21: mol_type = other DNA; mol_type = other DNA
cggtccgagtaccacttccct

SEQ ID NO: 35121 - DNA, 21 bp, synthetic construct
  source 1..21: mol_type = other DNA; mol_type = other DNA
atgtgtaggccttgttcagaa

SEQ ID NO: 35122 - DNA, 21 bp, synthetic construct
  source 1..21: mol_type = other DNA; mol_type = other DNA
tactacagtggcgtaaaggtc

SEQ ID NO: 35123 - DNA, 21 bp, synthetic construct
  source 1..21: mol_type = other DNA; mol_type = other DNA
ggagtggagtcggtgcgatgg

SEQ ID NO: 35124 - DNA, 21 bp, synthetic construct
  source 1..21: mol_type = other DNA; mol_type = other DNA
tatgcgcgtcatggactgaat

SEQ ID NO: 35125 - DNA, 21 bp, synthetic construct
  source 1..21: mol_type = other DNA; mol_type = other DNA
tactcgagaaataatcacaat

SEQ ID NO: 35126 - DNA, 21 bp, synthetic construct
  source 1..21: mol_type = other DNA; mol_type = other DNA
tactatactggcatttctgag

SEQ ID NO: 35127 - DNA, 21 bp, synthetic construct
  source 1..21: mol_type = other DNA; mol_type = other DNA
cggatggaagctgtcaagtgg

SEQ ID NO: 35128 - DNA, 21 bp, synthetic construct
  source 1..21: mol_type = other DNA; mol_type = other DNA
gatttgaactcgcgtggttgg

SEQ ID NO: 35129 - DNA, 21 bp, synthetic construct
  source 1..21: mol_type = other DNA; mol_type = other DNA
tatataaaatcggatacgggg

SEQ ID NO: 35130 - DNA, 21 bp, synthetic construct
  source 1..21: mol_type = other DNA; mol_type = other DNA
tacagtagactggactccttc

SEQ ID NO: 35131 - DNA, 21 bp, synthetic construct
  source 1..21: mol_type = other DNA; mol_type = other DNA
tactccagatccaatcataac

SEQ ID NO: 35132 - DNA, 21 bp, synthetic construct
  source 1..21: mol_type = other DNA; mol_type = other DNA
aaatgcgggaaacaagaggga

SEQ ID NO: 35133 - DNA, 21 bp, synthetic construct
  source 1..21: mol_type = other DNA; mol_type = other DNA
tatttttctgcggttagggca

SEQ ID NO: 35134 - DNA, 21 bp, synthetic construct
  source 1..21: mol_type = other DNA; mol_type = other DNA
tacagcagatacaacgttaat

SEQ ID NO: 35135 - DNA, 21 bp, synthetic construct
  source 1..21: mol_type = other DNA; mol_type = other DNA
atcgatgaatggaaagggtgg

SEQ ID NO: 35136 - DNA, 21 bp, synthetic construct
  source 1..21: mol_type = other DNA; mol_type = other DNA
gctatgctcagttcaacatgg

SEQ ID NO: 35137 - DNA, 21 bp, synthetic construct
  source 1..21: mol_type = other DNA; mol_type = other DNA
aagacggagtttacgacctat

SEQ ID NO: 35138 - DNA, 21 bp, synthetic construct
  source 1..21: mol_type = other DNA; mol_type = other DNA
tgtggaggcggcaaaacgccc

SEQ ID NO: 35139 - DNA, 21 bp, synthetic construct
  source 1..21: mol_type = other DNA; mol_type = other DNA
tgcagacctcagatggcgagc

SEQ ID NO: 35140 - DNA, 21 bp, synthetic construct
  source 1..21: mol_type = other DNA; mol_type = other DNA
ggagatgaatgggagcacttc

SEQ ID NO: 35141 - DNA, 21 bp, synthetic construct
  source 1..21: mol_type = other DNA; mol_type = other DNA
aggggaggggaccgcgcgtgg

SEQ ID NO: 35142 - DNA, 21 bp, synthetic construct
  source 1..21: mol_type = other DNA; mol_type = other DNA
acttggacgggcatgaatgct

SEQ ID NO: 35143 - DNA, 21 bp, synthetic construct
  source 1..21: mol_type = other DNA; mol_type = other DNA
tactggagcggcttacatgcg

SEQ ID NO: 35144 - DNA, 21 bp, synthetic construct
  source 1..21: mol_type = other DNA; mol_type = other DNA
tactacagcggcgtaaggaac

SEQ ID NO: 35145 - DNA, 21 bp, synthetic construct
  source 1..21: mol_type = other DNA; mol_type = other DNA
ttggctagaggagggttcgac

SEQ ID NO: 35146 - DNA, 21 bp, synthetic construct
  source 1..21: mol_type = other DNA; mol_type = other DNA
aagttggaaagcgttgtctgg

SEQ ID NO: 35147 - DNA, 21 bp, synthetic construct
  source 1..21: mol_type = other DNA; mol_type = other DNA
ttatggacaggagttgggcct

SEQ ID NO: 35148 - DNA, 21 bp, synthetic construct
  source 1..21: mol_type = other DNA; mol_type = other DNA
tatagcagagggaatcataat

SEQ ID NO: 35149 - DNA, 21 bp, synthetic construct
  source 1..21: mol_type = other DNA; mol_type = other DNA
cgcggtgactcatctaggtgg

SEQ ID NO: 35150 - DNA, 21 bp, synthetic construct
  source 1..21: mol_type = other DNA; mol_type = other DNA
atgtgggacggaacatatgcg

SEQ ID NO: 35151 - DNA, 21 bp, synthetic construct
  source 1..21: mol_type = other DNA; mol_type = other DNA
ggcgacggcacaaagtgcggg

SEQ ID NO: 35152 - DNA, 21 bp, synthetic construct
  source 1..21: mol_type = other DNA; mol_type = other DNA
tactggactgggttacacgaa

SEQ ID NO: 35153 - DNA, 21 bp, synthetic construct
  source 1..21: mol_type = other DNA; mol_type = other DNA
tttagtcgtctgaacgggaat

SEQ ID NO: 35154 - DNA, 21 bp, synthetic construct
  source 1..21: mol_type = other DNA; mol_type = other DNA
cgagataacggtgtccgctgg

SEQ ID NO: 35155 - DNA, 21 bp, synthetic construct
  source 1..21: mol_type = other DNA; mol_type = other DNA
tatttccaggggatccaagct

SEQ ID NO: 35156 - DNA, 21 bp, synthetic construct
  source 1..21: mol_type = other DNA; mol_type = other DNA
agggacaatggagtgaggtgg

SEQ ID NO: 35157 - DNA, 21 bp, synthetic construct
  source 1..21: mol_type = other DNA; mol_type = other DNA
gacggatattcaagggaatgg

SEQ ID NO: 35158 - DNA, 21 bp, synthetic construct
  source 1..21: mol_type = other DNA; mol_type = other DNA
caatgggctcgcagcctcgag

SEQ ID NO: 35159 - DNA, 21 bp, synthetic construct
  source 1..21: mol_type = other DNA; mol_type = other DNA
ggggacgagtgggaacatttt

SEQ ID NO: 35160 - DNA, 21 bp, synthetic construct
  source 1..21: mol_type = other DNA; mol_type = other DNA
cgggaagaaactcgctattgg

SEQ ID NO: 35161 - DNA, 21 bp, synthetic construct
  source 1..21: mol_type = other DNA; mol_type = other DNA
tactcaaggtataacataaac

SEQ ID NO: 35162 - DNA, 21 bp, synthetic construct
  source 1..21: mol_type = other DNA; mol_type = other DNA
tgcgcgcccgtttatagagag

SEQ ID NO: 35163 - DNA, 21 bp, synthetic construct
  source 1..21: mol_type = other DNA; mol_type = other DNA
ggtgtaggcacatcacgatgg

SEQ ID NO: 35164 - DNA, 21 bp, synthetic construct
  source 1..21: mol_type = other DNA; mol_type = other DNA
tgcaaaacattttcaaaagaa

SEQ ID NO: 35165 - DNA, 21 bp, synthetic construct
  source 1..21: mol_type = other DNA; mol_type = other DNA
acttgggacggtctagtagcg

SEQ ID NO: 35166 - DNA, 21 bp, synthetic construct
  source 1..21: mol_type = other DNA; mol_type = other DNA
tttagccgagttaactacaac

SEQ ID NO: 35167 - DNA, 21 bp, synthetic construct
  source 1..21: mol_type = other DNA; mol_type = other DNA
tattggtcgggcgagagagaa

SEQ ID NO: 35168 - DNA, 21 bp, synthetic construct
  source 1..21: mol_type = other DNA; mol_type = other DNA
cgcgacgtaacggttttcccg

SEQ ID NO: 35169 - DNA, 21 bp, synthetic construct
  source 1..21: mol_type = other DNA; mol_type = other DNA
ttagcggggcgcggatgggac

SEQ ID NO: 35170 - DNA, 21 bp, synthetic construct
  source 1..21: mol_type = other DNA; mol_type = other DNA
tatgcgaagaatggccaaaat

SEQ ID NO: 35171 - DNA, 21 bp, synthetic construct
  source 1..21: mol_type = other DNA; mol_type = other DNA
agtatgcgggacaggagttgg

SEQ ID NO: 35172 - DNA, 21 bp, synthetic construct
  source 1..21: mol_type = other DNA; mol_type = other DNA
tactcgcgccacaatatgaac

SEQ ID NO: 35173 - DNA, 21 bp, synthetic construct
  source 1..21: mol_type = other DNA; mol_type = other DNA
ttttttaccggacgcatggac

SEQ ID NO: 35174 - DNA, 21 bp, synthetic construct
  source 1..21: mol_type = other DNA; mol_type = other DNA
atggttcgaaaccaaccgaac

SEQ ID NO: 35175 - DNA, 21 bp, synthetic construct
  source 1..21: mol_type = other DNA; mol_type = other DNA
ttcagtcgcgcaaatacgaat

SEQ ID NO: 35176 - DNA, 21 bp, synthetic construct
  source 1..21: mol_type = other DNA; mol_type = other DNA
agtctctcgtcatccgtttgg

SEQ ID NO: 35177 - DNA, 21 bp, synthetic construct
  source 1..21: mol_type = other DNA; mol_type = other DNA
acttggtcaggtgacaatgcc

SEQ ID NO: 35178 - DNA, 21 bp, synthetic construct
  source 1..21: mol_type = other DNA; mol_type = other DNA
ttaaaaggtagttgcgagcag

SEQ ID NO: 35179 - DNA, 21 bp, synthetic construct
  source 1..21: mol_type = other DNA; mol_type = other DNA
tatttccagggtgtcagagac

SEQ ID NO: 35180 - DNA, 21 bp, synthetic construct
  source 1..21: mol_type = other DNA; mol_type = other DNA
tgtaacaaacctatgactcag

SEQ ID NO: 35181 - DNA, 21 bp, synthetic construct
  source 1..21: mol_type = other DNA; mol_type = other DNA
gggagcgagtttcatacatgg

SEQ ID NO: 35182 - DNA, 21 bp, synthetic construct
  source 1..21: mol_type = other DNA; mol_type = other DNA
tacttttccggcataacgacg

SEQ ID NO: 35183 - DNA, 21 bp, synthetic construct
  source 1..21: mol_type = other DNA; mol_type = other DNA
aaaaacgactacaacacttgg

SEQ ID NO: 35184 - DNA, 21 bp, synthetic construct
  source 1..21: mol_type = other DNA; mol_type = other DNA
tttgcgaaaaccggctggaac

SEQ ID NO: 35185 - DNA, 21 bp, synthetic construct
  source 1..21: mol_type = other DNA; mol_type = other DNA
tacttttcagggtatacgtca

SEQ ID NO: 35186 - DNA, 21 bp, synthetic construct
  source 1..21: mol_type = other DNA; mol_type = other DNA
tacactcgcacgcaagcatat

SEQ ID NO: 35187 - DNA, 21 bp, synthetic construct
  source 1..21: mol_type = other DNA; mol_type = other DNA
tattatagtggagttgcactc

SEQ ID NO: 35188 - DNA, 21 bp, synthetic construct
  source 1..21: mol_type = other DNA; mol_type = other DNA
ggcggcggaactagcacatgg

SEQ ID NO: 35189 - DNA, 21 bp, synthetic construct
  source 1..21: mol_type = other DNA; mol_type = other DNA
agaggagatagtagccgttgg

SEQ ID NO: 35190 - DNA, 21 bp, synthetic construct
  source 1..21: mol_type = other DNA; mol_type = other DNA
agagatcccggggtccggtgg

SEQ ID NO: 35191 - DNA, 21 bp, synthetic construct
  source 1..21: mol_type = other DNA; mol_type = other DNA
tcagacggattctctaaatgg

SEQ ID NO: 35192 - DNA, 21 bp, synthetic construct
  source 1..21: mol_type = other DNA; mol_type = other DNA
tactatcacggcgtacgtgat

SEQ ID NO: 35193 - DNA, 21 bp, synthetic construct
  source 1..21: mol_type = other DNA; mol_type = other DNA
actgatgactggtcgacctgg

SEQ ID NO: 35194 - DNA, 21 bp, synthetic construct
  source 1..21: mol_type = other DNA; mol_type = other DNA
agaacctatgaagtgtatcct

SEQ ID NO: 35195 - DNA, 21 bp, synthetic construct
  source 1..21: mol_type = other DNA; mol_type = other DNA
gaggctttaaacggctgggac

SEQ ID NO: 35196 - DNA, 21 bp, synthetic construct
  source 1..21: mol_type = other DNA; mol_type = other DNA
gtcgcgaccttgggctgggat

SEQ ID NO: 35197 - DNA, 21 bp, synthetic construct
  source 1..21: mol_type = other DNA; mol_type = other DNA
aagaacgactacaatagctgg

SEQ ID NO: 35198 - DNA, 21 bp, synthetic construct
  source 1..21: mol_type = other DNA; mol_type = other DNA
aggcttgaggcggctaattgg

SEQ ID NO: 35199 - DNA, 21 bp, synthetic construct
  source 1..21: mol_type = other DNA; mol_type = other DNA
ggaggtgacttcgaacattgg

SEQ ID NO: 35200 - DNA, 21 bp, synthetic construct
  source 1..21: mol_type = other DNA; mol_type = other DNA
atgaaggatgggactgcttcg

SEQ ID NO: 35201 - DNA, 21 bp, synthetic construct
  source 1..21: mol_type = other DNA; mol_type = other DNA
aaagatgggtacactacttgg

SEQ ID NO: 35202 - DNA, 21 bp, synthetic construct
  source 1..21: mol_type = other DNA; mol_type = other DNA
agaatgagtacgaatggtata

SEQ ID NO: 35203 - DNA, 21 bp, synthetic construct
  source 1..21: mol_type = other DNA; mol_type = other DNA
cagcgggatggcacccccgct

SEQ ID NO: 35204 - DNA, 21 bp, synthetic construct
  source 1..21: mol_type = other DNA; mol_type = other DNA
tgggtcagaagtgacacgaag

SEQ ID NO: 35205 - DNA, 21 bp, synthetic construct
  source 1..21: mol_type = other DNA; mol_type = other DNA
tattcaagacacaacttcaac

SEQ ID NO: 35206 - DNA, 21 bp, synthetic construct
  source 1..21: mol_type = other DNA; mol_type = other DNA
cggggagcaggagtttatccc

SEQ ID NO: 35207 - DNA, 21 bp, synthetic construct
  source 1..21: mol_type = other DNA; mol_type = other DNA
ttcggtaagggtgaatgggcg

SEQ ID NO: 35208 - DNA, 21 bp, synthetic construct
  source 1..21: mol_type = other DNA; mol_type = other DNA
acccgtgagggtgaccctccg

SEQ ID NO: 35209 - DNA, 21 bp, synthetic construct
  source 1..21: mol_type = other DNA; mol_type = other DNA
tacttcgccggagtgaaggtg

SEQ ID NO: 35210 - DNA, 21 bp, synthetic construct
  source 1..21: mol_type = other DNA; mol_type = other DNA
tattgggctggcgtgatagat

SEQ ID NO: 35211 - DNA, 21 bp, synthetic construct
  source 1..21: mol_type = other DNA; mol_type = other DNA
ttgcatcgtgagtcacctaat

SEQ ID NO: 35212 - DNA, 21 bp, synthetic construct
  source 1..21: mol_type = other DNA; mol_type = other DNA
tactcaagggtaaattataat

SEQ ID NO: 35213 - DNA, 21 bp, synthetic construct
  source 1..21: mol_type = other DNA; mol_type = other DNA
tacgtacgatttgaccagggc

SEQ ID NO: 35214 - DNA, 21 bp, synthetic construct
  source 1..21: mol_type = other DNA; mol_type = other DNA
tgcaaacctgactcaagagtg

SEQ ID NO: 35215 - DNA, 21 bp, synthetic construct
  source 1..21: mol_type = other DNA; mol_type = other DNA
caagacagcacgaacggtagg

SEQ ID NO: 35216 - DNA, 21 bp, synthetic construct
  source 1..21: mol_type = other DNA; mol_type = other DNA
tattattcggggcaaaaaagt

SEQ ID NO: 35217 - DNA, 21 bp, synthetic construct
  source 1..21: mol_type = other DNA; mol_type = other DNA
tattttatgggagaaagggaa

SEQ ID NO: 35218 - DNA, 21 bp, synthetic construct
  source 1..21: mol_type = other DNA; mol_type = other DNA
tattcaaggtccggtggcaat

SEQ ID NO: 35219 - DNA, 21 bp, synthetic construct
  source 1..21: mol_type = other DNA; mol_type = other DNA
ggagggtcaggatcgagttgg

SEQ ID NO: 35220 - DNA, 21 bp, synthetic construct
  source 1..21: mol_type = other DNA; mol_type = other DNA
tcatatgacggtacagcagcc

SEQ ID NO: 35221 - DNA, 21 bp, synthetic construct
  source 1..21: mol_type = other DNA; mol_type = other DNA
tatgcgcggtcaaacgtcaat

SEQ ID NO: 35222 - DNA, 21 bp, synthetic construct
  source 1..21: mol_type = other DNA; mol_type = other DNA
tacagttctaccaatggtata

SEQ ID NO: 35223 - DNA, 21 bp, synthetic construct
  source 1..21: mol_type = other DNA; mol_type = other DNA
tatactcatacacaaaggaat

SEQ ID NO: 35224 - DNA, 21 bp, synthetic construct
  source 1..21: mol_type = other DNA; mol_type = other DNA
tatagtcgacacaatataaat

SEQ ID NO: 35225 - DNA, 21 bp, synthetic construct
  source 1..21: mol_type = other DNA; mol_type = other DNA
ttcatggatggaactcccgct

SEQ ID NO: 35226 - DNA, 21 bp, synthetic construct
  source 1..21: mol_type = other DNA; mol_type = other DNA
tggtggagcgggaggattgaa

SEQ ID NO: 35227 - DNA, 21 bp, synthetic construct
  source 1..21: mol_type = other DNA; mol_type = other DNA
ctcagaaacggcactggcccg

SEQ ID NO: 35228 - DNA, 21 bp, synthetic construct
  source 1..21: mol_type = other DNA; mol_type = other DNA
ctaccccgcacaggtgattgg

SEQ ID NO: 35229 - DNA, 21 bp, synthetic construct
  source 1..21: mol_type = other DNA; mol_type = other DNA
ctcagcagcactaacggtgtt

SEQ ID NO: 35230 - DNA, 21 bp, synthetic construct
  source 1..21: mol_type = other DNA; mol_type = other DNA
tattctcgtcatgggcaaaat

SEQ ID NO: 35231 - DNA, 21 bp, synthetic construct
  source 1..21: mol_type = other DNA; mol_type = other DNA
tacttctcaggaaccaataat

SEQ ID NO: 35232 - DNA, 21 bp, synthetic construct
  source 1..21: mol_type = other DNA; mol_type = other DNA
ttctttaccggtcggcttgat

SEQ ID NO: 35233 - DNA, 21 bp, synthetic construct
  source 1..21: mol_type = other DNA; mol_type = other DNA
ttatggtcaggcgaagcgccc

SEQ ID NO: 35234 - DNA, 21 bp, synthetic construct
  source 1..21: mol_type = other DNA; mol_type = other DNA
aattgggctaggagtgtagaa

SEQ ID NO: 35235 - DNA, 21 bp, synthetic construct
  source 1..21: mol_type = other DNA; mol_type = other DNA
tactcgaaacatggccataac

SEQ ID NO: 35236 - DNA, 21 bp, synthetic construct
  source 1..21: mol_type = other DNA; mol_type = other DNA
gggtgtagaccctgccctact

SEQ ID NO: 35237 - DNA, 21 bp, synthetic construct
  source 1..21: mol_type = other DNA; mol_type = other DNA
acacgctggggagaaaatgcc

SEQ ID NO: 35238 - DNA, 21 bp, synthetic construct
  source 1..21: mol_type = other DNA; mol_type = other DNA
tactctaagtatggcgcgaat

SEQ ID NO: 35239 - DNA, 21 bp, synthetic construct
  source 1..21: mol_type = other DNA; mol_type = other DNA
ttaacttatgatgcgtatgaa

SEQ ID NO: 35240 - DNA, 21 bp, synthetic construct
  source 1..21: mol_type = other DNA; mol_type = other DNA
ctctttcgttcaggacccaac

SEQ ID NO: 35241 - DNA, 21 bp, synthetic construct
  source 1..21: mol_type = other DNA; mol_type = other DNA
tacagcaggcataatcagaac

SEQ ID NO: 35242 - DNA, 21 bp, synthetic construct
  source 1..21: mol_type = other DNA; mol_type = other DNA
aggactgtccatacgtacccc

SEQ ID NO: 35243 - DNA, 21 bp, synthetic construct
  source 1..21: mol_type = other DNA; mol_type = other DNA
tccgatggcgtatcctactgg

SEQ ID NO: 35244 - DNA, 21 bp, synthetic construct
  source 1..21: mol_type = other DNA; mol_type = other DNA
atgcccgatggtacgggtccg

SEQ ID NO: 35245 - DNA, 21 bp, synthetic construct
  source 1..21: mol_type = other DNA; mol_type = other DNA
tatttcgcggggcgtctagcg

SEQ ID NO: 35246 - DNA, 21 bp, synthetic construct
  source 1..21: mol_type = other DNA; mol_type = other DNA
tacagatctaccaacggcgtc

SEQ ID NO: 35247 - DNA, 21 bp, synthetic construct
  source 1..21: mol_type = other DNA; mol_type = other DNA
tggacaagcgataacgggatt

SEQ ID NO: 35248 - DNA, 21 bp, synthetic construct
  source 1..21: mol_type = other DNA; mol_type = other DNA
tactggcaaggaaccgttgca

SEQ ID NO: 35249 - DNA, 21 bp, synthetic construct
  source 1..21: mol_type = other DNA; mol_type = other DNA
gtaatgagcgataacggcatt

SEQ ID NO: 35250 - DNA, 21 bp, synthetic construct
  source 1..21: mol_type = other DNA; mol_type = other DNA
ggtggaccgggcacacgctgg

SEQ ID NO: 35251 - DNA, 21 bp, synthetic construct
  source 1..21: mol_type = other DNA; mol_type = other DNA
tttatggacggcacgcctgca

SEQ ID NO: 35252 - DNA, 21 bp, synthetic construct
  source 1..21: mol_type = other DNA; mol_type = other DNA
caaagagacggaactccagcc

SEQ ID NO: 35253 - DNA, 21 bp, synthetic construct
  source 1..21: mol_type = other DNA; mol_type = other DNA
tattggagtggccgtcctgaa

SEQ ID NO: 35254 - DNA, 21 bp, synthetic construct
  source 1..21: mol_type = other DNA; mol_type = other DNA
tggtatagtggcgttagggag

SEQ ID NO: 35255 - DNA, 21 bp, synthetic construct
  source 1..21: mol_type = other DNA; mol_type = other DNA
ttaagtaaatctgggtttaat

SEQ ID NO: 35256 - DNA, 21 bp, synthetic construct
  source 1..21: mol_type = other DNA; mol_type = other DNA
tccatggcttctaatacttgg

SEQ ID NO: 35257 - DNA, 21 bp, synthetic construct
  source 1..21: mol_type = other DNA; mol_type = other DNA
tggcatagtacgaacggtgtt

SEQ ID NO: 35258 - DNA, 21 bp, synthetic construct
  source 1..21: mol_type = other DNA; mol_type = other DNA
ggtggcgtcagctcgacatgg

SEQ ID NO: 35259 - DNA, 21 bp, synthetic construct
  source 1..21: mol_type = other DNA; mol_type = other DNA
ataggaatgaagggctgggat

SEQ ID NO: 35260 - DNA, 21 bp, synthetic construct
  source 1..21: mol_type = other DNA; mol_type = other DNA
aaggacgacttccaatcattt

SEQ ID NO: 35261 - DNA, 21 bp, synthetic construct
  source 1..21: mol_type = other DNA; mol_type = other DNA
tacagccgaaacggatataac

SEQ ID NO: 35262 - DNA, 21 bp, synthetic construct
  source 1..21: mol_type = other DNA; mol_type = other DNA
ggagtgggaactagcaggtgg

SEQ ID NO: 35263 - DNA, 21 bp, synthetic construct
  source 1..21: mol_type = other DNA; mol_type = other DNA
tattattcgggtactagaagt

SEQ ID NO: 35264 - DNA, 21 bp, synthetic construct
  source 1..21: mol_type = other DNA; mol_type = other DNA
gtaagtgaatttcaaacttac

SEQ ID NO: 35265 - DNA, 21 bp, synthetic construct
  source 1..21: mol_type = other DNA; mol_type = other DNA
tacgcaaaagtaggatacaac

SEQ ID NO: 35266 - DNA, 21 bp, synthetic construct
  source 1..21: mol_type = other DNA; mol_type = other DNA
tattcgaggcatggaacgaac

SEQ ID NO: 35267 - DNA, 21 bp, synthetic construct
  source 1..21: mol_type = other DNA; mol_type = other DNA
gacctcggatcggcgagctgg

SEQ ID NO: 35268 - DNA, 21 bp, synthetic construct
  source 1..21: mol_type = other DNA; mol_type = other DNA
atcttatcctccagcgggtgg

SEQ ID NO: 35269 - DNA, 21 bp, synthetic construct
  source 1..21: mol_type = other DNA; mol_type = other DNA
acaaagttaggtgacaacgca

SEQ ID NO: 35270 - DNA, 21 bp, synthetic construct
  source 1..21: mol_type = other DNA; mol_type = other DNA
tggacctctgacaatggtatc

SEQ ID NO: 35271 - DNA, 21 bp, synthetic construct
  source 1..21: mol_type = other DNA; mol_type = other DNA
tacatcaaaagccagagttat

SEQ ID NO: 35272 - DNA, 21 bp, synthetic construct
  source 1..21: mol_type = other DNA; mol_type = other DNA
cttgcaggccgagggtgggat

SEQ ID NO: 35273 - DNA, 21 bp, synthetic construct
  source 1..21: mol_type = other DNA; mol_type = other DNA
gccaatagtacgaatggcgta

SEQ ID NO: 35274 - DNA, 21 bp, synthetic construct
  source 1..21: mol_type = other DNA; mol_type = other DNA
attgacgaatggcagagctac

SEQ ID NO: 35275 - DNA, 21 bp, synthetic construct
  source 1..21: mol_type = other DNA; mol_type = other DNA
cgtctagagagcgttcagtgg

SEQ ID NO: 35276 - DNA, 21 bp, synthetic construct
  source 1..21: mol_type = other DNA; mol_type = other DNA
gggggggaatacgtgacgtgg

SEQ ID NO: 35277 - DNA, 21 bp, synthetic construct
  source 1..21: mol_type = other DNA; mol_type = other DNA
ccaggagggaccagcacatgg

SEQ ID NO: 35278 - DNA, 21 bp, synthetic construct
  source 1..21: mol_type = other DNA; mol_type = other DNA
tatagtcggatgggtgggaac

SEQ ID NO: 35279 - DNA, 21 bp, synthetic construct
  source 1..21: mol_type = other DNA; mol_type = other DNA
tactcaagggggaacctgaac

SEQ ID NO: 35280 - DNA, 21 bp, synthetic construct
  source 1..21: mol_type = other DNA; mol_type = other DNA
tacgcccgtgccaacttcaat

SEQ ID NO: 35281 - DNA, 21 bp, synthetic construct
  source 1..21: mol_type = other DNA; mol_type = other DNA
agaaatggtgccagtagttgg

SEQ ID NO: 35282 - DNA, 21 bp, synthetic construct
  source 1..21: mol_type = other DNA; mol_type = other DNA
tgcaaaacggaagccagagga

SEQ ID NO: 35283 - DNA, 21 bp, synthetic construct
  source 1..21: mol_type = other DNA; mol_type = other DNA
tctatgatggatcgctcgtgg

SEQ ID NO: 35284 - DNA, 21 bp, synthetic construct
  source 1..21: mol_type = other DNA; mol_type = other DNA
cgagatgattgggtcaaatgg

SEQ ID NO: 35285 - DNA, 21 bp, synthetic construct
  source 1..21: mol_type = other DNA; mol_type = other DNA
tggaccagcgacaatggaata

SEQ ID NO: 35286 - DNA, 21 bp, synthetic construct
  source 1..21: mol_type = other DNA; mol_type = other DNA
tattacagcggcacgagatcc

SEQ ID NO: 35287 - DNA, 21 bp, synthetic construct
  source 1..21: mol_type = other DNA; mol_type = other DNA
ttcttctcaggcgttgtaaaa

SEQ ID NO: 35288 - DNA, 21 bp, synthetic construct
  source 1..21: mol_type = other DNA; mol_type = other DNA
tacttcgccggggtaatggag

SEQ ID NO: 35289 - DNA, 21 bp, synthetic construct
  source 1..21: mol_type = other DNA; mol_type = other DNA
tgtaagccagggatgagagaa

SEQ ID NO: 35290 - DNA, 21 bp, synthetic construct
  source 1..21: mol_type = other DNA; mol_type = other DNA
actaccagccaaaacggtcga

SEQ ID NO: 35291 - DNA, 21 bp, synthetic construct
  source 1..21: mol_type = other DNA; mol_type = other DNA
cgtctggaaagcaccgtctgg

SEQ ID NO: 35292 - DNA, 21 bp, synthetic construct
  source 1..21: mol_type = other DNA; mol_type = other DNA
tattggagcggaacttcgtcg

SEQ ID NO: 35293 - DNA, 21 bp, synthetic construct
  source 1..21: mol_type = other DNA; mol_type = other DNA
tatgctcgtaatggagggaac

SEQ ID NO: 35294 - DNA, 21 bp, synthetic construct
  source 1..21: mol_type = other DNA; mol_type = other DNA
cagaacagcacaaatggacgc

SEQ ID NO: 35295 - DNA, 21 bp, synthetic construct
  source 1..21: mol_type = other DNA; mol_type = other DNA
tactacacaggctacaaagag

SEQ ID NO: 35296 - DNA, 21 bp, synthetic construct
  source 1..21: mol_type = other DNA; mol_type = other DNA
tccttaagctcgagtgtgtgg

SEQ ID NO: 35297 - DNA, 21 bp, synthetic construct
  source 1..21: mol_type = other DNA; mol_type = other DNA
cctgcgtcaaccaatggggtc

SEQ ID NO: 35298 - DNA, 21 bp, synthetic construct
  source 1..21: mol_type = other DNA; mol_type = other DNA
ttttttagcgggcgcttagag

SEQ ID NO: 35299 - DNA, 21 bp, synthetic construct
  source 1..21: mol_type = other DNA; mol_type = other DNA
tgtggtaagagggatcctgac

SEQ ID NO: 35300 - DNA, 21 bp, synthetic construct
  source 1..21: mol_type = other DNA; mol_type = other DNA
tatagcaggaacaattacaac

SEQ ID NO: 35301 - DNA, 21 bp, synthetic construct
  source 1..21: mol_type = other DNA; mol_type = other DNA
tcgatgcaggatcgtaggtgg

SEQ ID NO: 35302 - DNA, 21 bp, synthetic construct
  source 1..21: mol_type = other DNA; mol_type = other DNA
cgtgaagactggagcacatac

SEQ ID NO: 35303 - DNA, 21 bp, synthetic construct
  source 1..21: mol_type = other DNA; mol_type = other DNA
ttggccaagcagggattcaat

SEQ ID NO: 35304 - DNA, 21 bp, synthetic construct
  source 1..21: mol_type = other DNA; mol_type = other DNA
tacgtctacagcgattcgcgt

SEQ ID NO: 35305 - DNA, 21 bp, synthetic construct
  source 1..21: mol_type = other DNA; mol_type = other DNA
agggacgagtaccaaacgtgg

SEQ ID NO: 35306 - DNA, 21 bp, synthetic construct
  source 1..21: mol_type = other DNA; mol_type = other DNA
tacgcacgtctaggcttcaac

SEQ ID NO: 35307 - DNA, 21 bp, synthetic construct
  source 1..21: mol_type = other DNA; mol_type = other DNA
ttttggtcaggcacgcatgat

SEQ ID NO: 35308 - DNA, 21 bp, synthetic construct
  source 1..21: mol_type = other DNA; mol_type = other DNA
tataattcgaccaatggtata

SEQ ID NO: 35309 - DNA, 21 bp, synthetic construct
  source 1..21: mol_type = other DNA; mol_type = other DNA
aactatgctaaaagctatgca

SEQ ID NO: 35310 - DNA, 21 bp, synthetic construct
  source 1..21: mol_type = other DNA; mol_type = other DNA
acaggcgactggacgcccttc

SEQ ID NO: 35311 - DNA, 21 bp, synthetic construct
  source 1..21: mol_type = other DNA; mol_type = other DNA
ggtggcgggactagcctctgg

SEQ ID NO: 35312 - DNA, 21 bp, synthetic construct
  source 1..21: mol_type = other DNA; mol_type = other DNA
tacgcgagggccggtacgaac

SEQ ID NO: 35313 - DNA, 21 bp, synthetic construct
  source 1..21: mol_type = other DNA
ggaggcgaatcctctctctgg

SEQ ID NO: 35314 - DNA, 21 bp, synthetic construct
  source 1..21: mol_type = other DNA
agaggagaatttatgagctac

SEQ ID NO: 35315 - DNA, 21 bp, synthetic construct
  source 1..21: mol_type = other DNA
tacgccagagggaactataac

SEQ ID NO: 35316 - DNA, 21 bp, synthetic construct
  source 1..21: mol_type = other DNA
ggggtgaaccaagttcgctgg

SEQ ID NO: 35317 - DNA, 21 bp, synthetic construct
  source 1..21: mol_type = other DNA
gattatgaatcaagaaagtgg

SEQ ID NO: 35318 - DNA, 21 bp, synthetic construct
  source 1..21: mol_type = other DNA
tattggtcaaaggtcgccgac

SEQ ID NO: 35319 - DNA, 21 bp, synthetic construct
  source 1..21: mol_type = other DNA
cgtacttatgatacctttgca

SEQ ID NO: 35320 - DNA, 21 bp, synthetic construct
  source 1..21: mol_type = other DNA
ttctggcacggtgtcagtgac

SEQ ID NO: 35321 - DNA, 21 bp, synthetic construct
  source 1..21: mol_type = other DNA; mol_type = other DNA
caggacgagtggacctacgtc

SEQ ID NO: 35322 - DNA, 21 bp, synthetic construct
  source 1..21: mol_type = other DNA; mol_type = other DNA
ctctcgaaagccaacatcaac

SEQ ID NO: 35323 - DNA, 21 bp, synthetic construct
  source 1..21: mol_type = other DNA; mol_type = other DNA
cgtgaaacctatgtctatcct

SEQ ID NO: 35324 - DNA, 21 bp, synthetic construct
  source 1..21: mol_type = other DNA; mol_type = other DNA
actgacgactactcaaaatgg

SEQ ID NO: 35325 - DNA, 21 bp, synthetic construct
  source 1..21: mol_type = other DNA; mol_type = other DNA
tgtaagcgagtgcagattgag

SEQ ID NO: 35326 - DNA, 21 bp, synthetic construct
  source 1..21: mol_type = other DNA; mol_type = other DNA
gcagagtcaagtaggttgtgg

SEQ ID NO: 35327 - DNA, 21 bp, synthetic construct
  source 1..21: mol_type = other DNA; mol_type = other DNA
ggcggagaggggtctgcatgg

SEQ ID NO: 35328 - DNA, 21 bp, synthetic construct
  source 1..21: mol_type = other DNA; mol_type = other DNA
ggcgaagaacatgttcggtgg

SEQ ID NO: 35329 - DNA, 21 bp, synthetic construct
  source 1..21: mol_type = other DNA; mol_type = other DNA
actagaacaggcgagaatgct

SEQ ID NO: 35330 - DNA, 21 bp, synthetic construct
  source 1..21: mol_type = other DNA; mol_type = other DNA
tactcgaaggcccaaggcgtc

SEQ ID NO: 35331 - DNA, 21 bp, synthetic construct
  source 1..21: mol_type = other DNA; mol_type = other DNA
aggttagagtctacagtttgg

SEQ ID NO: 35332 - DNA, 21 bp, synthetic construct
  source 1..21: mol_type = other DNA; mol_type = other DNA
attccaccactttttaacgtc

SEQ ID NO: 35333 - DNA, 21 bp, synthetic construct
  source 1..21: mol_type = other DNA; mol_type = other DNA
tttcggtcaactaacggtatc

SEQ ID NO: 35334 - DNA, 21 bp, synthetic construct
  source 1..21: mol_type = other DNA; mol_type = other DNA
acacgaaccggagaaaacgca

SEQ ID NO: 35335 - DNA, 21 bp, synthetic construct
  source 1..21: mol_type = other DNA; mol_type = other DNA
tacgctaggcatgggttaaac

SEQ ID NO: 35336 - DNA, 21 bp, synthetic construct
  source 1..21: mol_type = other DNA; mol_type = other DNA
tattcaaagtcgggcgccaat

SEQ ID NO: 35337 - DNA, 21 bp, synthetic construct
  source 1..21: mol_type = other DNA; mol_type = other DNA
gacctccgcactgctgcctgg

SEQ ID NO: 35338 - DNA, 21 bp, synthetic construct
  source 1..21: mol_type = other DNA; mol_type = other DNA
tattcacgaggcgggtacaat

SEQ ID NO: 35339 - DNA, 21 bp, synthetic construct
  source 1..21: mol_type = other DNA; mol_type = other DNA
aggacgtacgacacgttcgcc

SEQ ID NO: 35340 - DNA, 21 bp, synthetic construct
  source 1..21: mol_type = other DNA; mol_type = other DNA
ccgttaaagtcttctttgtgg

SEQ ID NO: 35341 - DNA, 21 bp, synthetic construct
  source 1..21: mol_type = other DNA; mol_type = other DNA
aaagaagattggacgccgtgg

SEQ ID NO: 35342 - DNA, 21 bp, synthetic construct
  source 1..21: mol_type = other DNA; mol_type = other DNA
tattccagagtaagcgataac

SEQ ID NO: 35343 - DNA, 21 bp, synthetic construct
  source 1..21: mol_type = other DNA; mol_type = other DNA
cgaggcgagtaccattatcca

SEQ ID NO: 35344 - DNA, 21 bp, synthetic construct
  source 1..21: mol_type = other DNA; mol_type = other DNA
tacgcgcgtcatggcaataat

SEQ ID NO: 35345 - DNA, 21 bp, synthetic construct
  source 1..21: mol_type = other DNA; mol_type = other DNA
atagcttcaaagggggcggga

SEQ ID NO: 35346 - DNA, 21 bp, synthetic construct
  source 1..21: mol_type = other DNA; mol_type = other DNA
ttagccaaaatggggcctaat

SEQ ID NO: 35347 - DNA, 21 bp, synthetic construct
  source 1..21: mol_type = other DNA; mol_type = other DNA
ggaagcgagtttatcacattt

SEQ ID NO: 35348 - DNA, 21 bp, synthetic construct
  source 1..21: mol_type = other DNA; mol_type = other DNA
ctttggaacggcacggccccg

SEQ ID NO: 35349 - DNA, 21 bp, synthetic construct
  source 1..21: mol_type = other DNA; mol_type = other DNA
acatggtctagcaatggcgtg

SEQ ID NO: 35350 - DNA, 21 bp, synthetic construct
  source 1..21: mol_type = other DNA; mol_type = other DNA
accttctacggagccaacgct

SEQ ID NO: 35351 - DNA, 21 bp, synthetic construct
  source 1..21: mol_type = other DNA; mol_type = other DNA
ggaggcactggctcaagttgg

SEQ ID NO: 35352 - DNA, 21 bp, synthetic construct
  source 1..21: mol_type = other DNA; mol_type = other DNA
tcgagccccggtgtgcggtgg

SEQ ID NO: 35353 - DNA, 21 bp, synthetic construct
  source 1..21: mol_type = other DNA; mol_type = other DNA
gaaatggagtcagtaaagtgg

SEQ ID NO: 35354 - DNA, 21 bp, synthetic construct
  source 1..21: mol_type = other DNA; mol_type = other DNA
ttctcgagaatgaacgctaac

SEQ ID NO: 35355 - DNA, 21 bp, synthetic construct
  source 1..21: mol_type = other DNA; mol_type = other DNA
tatagcagagctaatcccaat

SEQ ID NO: 35356 - DNA, 21 bp, synthetic construct
  source 1..21: mol_type = other DNA; mol_type = other DNA
accagatatggtgagaatgcg

SEQ ID NO: 35357 - DNA, 21 bp, synthetic construct
  source 1..21: mol_type = other DNA; mol_type = other DNA
agatcggaaactagctactgg

SEQ ID NO: 35358 - DNA, 21 bp, synthetic construct
  source 1..21: mol_type = other DNA; mol_type = other DNA
aactgggcacggtctcttgag

SEQ ID NO: 35359 - DNA, 21 bp, synthetic construct
  source 1..21: mol_type = other DNA; mol_type = other DNA
cgtggcgagttcgttagttgg

SEQ ID NO: 35360 - DNA, 21 bp, synthetic construct
  source 1..21: mol_type = other DNA; mol_type = other DNA
aactgggctcgctccatagag

SEQ ID NO: 35361 - DNA, 21 bp, synthetic construct
  source 1..21: mol_type = other DNA; mol_type = other DNA
cgtagtgagtttaccccctac

SEQ ID NO: 35362 - DNA, 21 bp, synthetic construct
  source 1..21: mol_type = other DNA; mol_type = other DNA
atcgatgagtggcaatcttat

SEQ ID NO: 35363 - DNA, 21 bp, synthetic construct
  source 1..21: mol_type = other DNA; mol_type = other DNA
tttgcccgaagcggtaacaac

SEQ ID NO: 35364 - DNA, 21 bp, synthetic construct
  source 1..21: mol_type = other DNA; mol_type = other DNA
cggagtgagttttcaggtttc

SEQ ID NO: 35365 - DNA, 21 bp, synthetic construct
  source 1..21: mol_type = other DNA; mol_type = other DNA
atagatgagtggaaaacctgg

SEQ ID NO: 35366 - DNA, 21 bp, synthetic construct
  source 1..21: mol_type = other DNA; mol_type = other DNA
tatagtaaatggaacaataat

SEQ ID NO: 35367 - DNA, 21 bp, synthetic construct
  source 1..21: mol_type = other DNA; mol_type = other DNA
ggtttgagctcagcgacatgg

SEQ ID NO: 35368 - DNA, 21 bp, synthetic construct
  source 1..21: mol_type = other DNA; mol_type = other DNA
tattcacgtttagactacgac

SEQ ID NO: 35369 - DNA, 21 bp, synthetic construct
  source 1..21: mol_type = other DNA; mol_type = other DNA
agggggggtcagtccacgtgg

SEQ ID NO: 35370 - DNA, 21 bp, synthetic construct
  source 1..21: mol_type = other DNA; mol_type = other DNA
gtccataaattgtgcccagta

SEQ ID NO: 35371 - DNA, 21 bp, synthetic construct
  source 1..21: mol_type = other DNA; mol_type = other DNA
aaagacgactatatgtactac

SEQ ID NO: 35372 - DNA, 21 bp, synthetic construct
  source 1..21: mol_type = other DNA; mol_type = other DNA
gaccttgagagtgcacgctgg

SEQ ID NO: 35373 - DNA, 21 bp, synthetic construct
  source 1..21: mol_type = other DNA; mol_type = other DNA
tactacagtggaacacgctcc

SEQ ID NO: 35374 - DNA, 21 bp, synthetic construct
  source 1..21: mol_type = other DNA; mol_type = other DNA
cggggcgactcacccttgtgg

SEQ ID NO: 35375 - DNA, 21 bp, synthetic construct
  source 1..21: mol_type = other DNA; mol_type = other DNA
aaggatgactacaaaacatgg

SEQ ID NO: 35376 - DNA, 21 bp, synthetic construct
  source 1..21: mol_type = other DNA; mol_type = other DNA
tatgcacggaacagtgacaac

SEQ ID NO: 35377 - DNA, 21 bp, synthetic construct
  source 1..21: mol_type = other DNA; mol_type = other DNA
agtgtgagtaccaatggtgta

SEQ ID NO: 35378 - DNA, 21 bp, synthetic construct
  source 1..21: mol_type = other DNA; mol_type = other DNA
tatgcgagaataggttacaat

SEQ ID NO: 35379 - DNA, 21 bp, synthetic construct
  source 1..21: mol_type = other DNA; mol_type = other DNA
ggggatgaatggcagccatac

SEQ ID NO: 35380 - DNA, 21 bp, synthetic construct
  source 1..21: mol_type = other DNA; mol_type = other DNA
agcatgcaggaccgcgcatgg

SEQ ID NO: 35381 - DNA, 21 bp, synthetic construct
  source 1..21: mol_type = other DNA; mol_type = other DNA
ggatccccaggtgctcactgg

SEQ ID NO: 35382 - DNA, 21 bp, synthetic construct
  source 1..21: mol_type = other DNA; mol_type = other DNA
agagggggagaaggggaatgc

SEQ ID NO: 35383 - DNA, 21 bp, synthetic construct
  source 1..21: mol_type = other DNA; mol_type = other DNA
tacgcgcgacacgggatgaat

SEQ ID NO: 35384 - DNA, 21 bp, synthetic construct
  source 1..21: mol_type = other DNA; mol_type = other DNA
tacttcacaggccatacgatg

SEQ ID NO: 35385 - DNA, 21 bp, synthetic construct
  source 1..21: mol_type = other DNA; mol_type = other DNA
ggagagcccggtgtaaggtgg

SEQ ID NO: 35386 - DNA, 21 bp, synthetic construct
  source 1..21: mol_type = other DNA; mol_type = other DNA
ctctggaaaaccggtcacaat

SEQ ID NO: 35387 - DNA, 21 bp, synthetic construct
  source 1..21: mol_type = other DNA; mol_type = other DNA
tgcaaaagggttcaaatagaa

SEQ ID NO: 35388 - DNA, 21 bp, synthetic construct
  source 1..21: mol_type = other DNA; mol_type = other DNA
cgtggcgaattcttatcctac

SEQ ID NO: 35389 - DNA, 21 bp, synthetic construct
  source 1..21: mol_type = other DNA; mol_type = other DNA
attcccagtagttcgttatgg

SEQ ID NO: 35390 - DNA, 21 bp, synthetic construct
  source 1..21: mol_type = other DNA; mol_type = other DNA
tattctcgcaataactttaat

SEQ ID NO: 35391 - DNA, 21 bp, synthetic construct
  source 1..21: mol_type = other DNA; mol_type = other DNA
acattctatggagacgccgct

SEQ ID NO: 35392 - DNA, 21 bp, synthetic construct
  source 1..21: mol_type = other DNA; mol_type = other DNA
tattggggcggcgttacggct

SEQ ID NO: 35393 - DNA, 21 bp, synthetic construct
  source 1..21: mol_type = other DNA; mol_type = other DNA
tacttctcagggcgcccttct

SEQ ID NO: 35394 - DNA, 21 bp, synthetic construct
  source 1..21: mol_type = other DNA; mol_type = other DNA
tactggtcaggactccccgat

SEQ ID NO: 35395 - DNA, 21 bp, synthetic construct
  source 1..21: mol_type = other DNA; mol_type = other DNA
ggtgggccgggcagcatctgg

SEQ ID NO: 35396 - DNA, 21 bp, synthetic construct
  source 1..21: mol_type = other DNA; mol_type = other DNA
ggaatggagcacgtacgctgg

SEQ ID NO: 35397 - DNA, 21 bp, synthetic construct
  source 1..21: mol_type = other DNA; mol_type = other DNA
gtgtccactcacgcgtgcgcg

SEQ ID NO: 35398 - DNA, 21 bp, synthetic construct
  source 1..21: mol_type = other DNA; mol_type = other DNA
ttttcaaggatgaataccaat

SEQ ID NO: 35399 - DNA, 21 bp, synthetic construct
  source 1..21: mol_type = other DNA; mol_type = other DNA
cgtgaggcggtctcgtcatgg

SEQ ID NO: 35400 - DNA, 21 bp, synthetic construct
  source 1..21: mol_type = other DNA; mol_type = other DNA
taccagcgtcaaggctgggac

SEQ ID NO: 35401 - DNA, 21 bp, synthetic construct
  source 1..21: mol_type = other DNA; mol_type = other DNA
gtattacaaagtagttcatgg

SEQ ID NO: 35402 - DNA, 21 bp, synthetic construct
  source 1..21: mol_type = other DNA; mol_type = other DNA
gcgaatgattatatgtcgtat

SEQ ID NO: 35403 - DNA, 21 bp, synthetic construct
  source 1..21: mol_type = other DNA; mol_type = other DNA
ttttggcatggaacgatcgag

SEQ ID NO: 35404 - DNA, 21 bp, synthetic construct
  source 1..21: mol_type = other DNA; mol_type = other DNA
aacctggaaagccacaagtgg

SEQ ID NO: 35405 - DNA, 21 bp, synthetic construct
  source 1..21: mol_type = other DNA; mol_type = other DNA
cggtcggagttcaccggcttt

SEQ ID NO: 35406 - DNA, 21 bp, synthetic construct
  source 1..21: mol_type = other DNA; mol_type = other DNA
tactcgcgtctggatgttttt

SEQ ID NO: 35407 - DNA, 21 bp, synthetic construct
  source 1..21: mol_type = other DNA; mol_type = other DNA
tatcacgctaagagtccgtgt

SEQ ID NO: 35408 - DNA, 21 bp, synthetic construct
  source 1..21: mol_type = other DNA; mol_type = other DNA
agaaatgaatttaccagtttt

SEQ ID NO: 35409 - DNA, 21 bp, synthetic construct
  source 1..21: mol_type = other DNA; mol_type = other DNA
ctttgggatggaactgaggca

SEQ ID NO: 35410 - DNA, 21 bp, synthetic construct
  source 1..21: mol_type = other DNA; mol_type = other DNA
cggagtgaatttaccccctac

SEQ ID NO: 35411 - DNA, 21 bp, synthetic construct
  source 1..21: mol_type = other DNA; mol_type = other DNA
tatcaccgcaacagtgataat

SEQ ID NO: 35412 - DNA, 21 bp, synthetic construct
  source 1..21: mol_type = other DNA; mol_type = other DNA
ggaggtggaacgacacgatgg

SEQ ID NO: 35413 - DNA, 21 bp, synthetic construct
  source 1..21: mol_type = other DNA; mol_type = other DNA
tcgatggacagcaggagctgg

SEQ ID NO: 35414 - DNA, 21 bp, synthetic construct
  source 1..21: mol_type = other DNA; mol_type = other DNA
aaggatgactggaattcgtat

SEQ ID NO: 35415 - DNA, 21 bp, synthetic construct
  source 1..21: mol_type = other DNA; mol_type = other DNA
gtctcggattttctcgtatat

SEQ ID NO: 35416 - DNA, 21 bp, synthetic construct
  source 1..21: mol_type = other DNA; mol_type = other DNA
acgtgggagggaaccaacgcc

SEQ ID NO: 35417 - DNA, 21 bp, synthetic construct
  source 1..21: mol_type = other DNA; mol_type = other DNA
tttgcacgagggggttacaat

SEQ ID NO: 35418 - DNA, 21 bp, synthetic construct
  source 1..21: mol_type = other DNA; mol_type = other DNA
ctatatgagtcccgcgcatgg

SEQ ID NO: 35419 - DNA, 21 bp, synthetic construct
  source 1..21: mol_type = other DNA; mol_type = other DNA
agcatggccagcaacacgtgg

SEQ ID NO: 35420 - DNA, 21 bp, synthetic construct
  source 1..21: mol_type = other DNA; mol_type = other DNA
agggataatggtgttcggtgg

SEQ ID NO: 35421 - DNA, 21 bp, synthetic construct
  source 1..21: mol_type = other DNA; mol_type = other DNA
aaaaacgagtatgtaaagtgg

SEQ ID NO: 35422 - DNA, 21 bp, synthetic construct
  source 1..21: mol_type = other DNA; mol_type = other DNA
tatcatcgtcttcacccattg

SEQ ID NO: 35423 - DNA, 21 bp, synthetic construct
  source 1..21: mol_type = other DNA; mol_type = other DNA
ctagctaagacggcgtggaac

SEQ ID NO: 35424 - DNA, 21 bp, synthetic construct
  source 1..21: mol_type = other DNA; mol_type = other DNA
tattctcgtctcagtgaattc

SEQ ID NO: 35425 - DNA, 21 bp, synthetic construct
  source 1..21: mol_type = other DNA; mol_type = other DNA
actaatgagtttaagccatgg

SEQ ID NO: 35426 - DNA, 21 bp, synthetic construct
  source 1..21: mol_type = other DNA; mol_type = other DNA
cgcgatgactcgagttcatgg

SEQ ID NO: 35427 - DNA, 21 bp, synthetic construct
  source 1..21: mol_type = other DNA; mol_type = other DNA
ggatctgagtttaagagctac

SEQ ID NO: 35428 - DNA, 21 bp, synthetic construct
  source 1..21: mol_type = other DNA; mol_type = other DNA
aattggtctaccaatggtgtg

SEQ ID NO: 35429 - DNA, 21 bp, synthetic construct
  source 1..21: mol_type = other DNA; mol_type = other DNA
tacttcaccgggatggtagtc

SEQ ID NO: 35430 - DNA, 21 bp, synthetic construct
  source 1..21: mol_type = other DNA; mol_type = other DNA
ttcgcgcggggcgggtataac

SEQ ID NO: 35431 - DNA, 21 bp, synthetic construct
  source 1..21: mol_type = other DNA; mol_type = other DNA
ttctggagcggaacacacgac

SEQ ID NO: 35432 - DNA, 21 bp, synthetic construct
  source 1..21: mol_type = other DNA; mol_type = other DNA
ggagggatttcatccacttgg

SEQ ID NO: 35433 - DNA, 21 bp, synthetic construct
  source 1..21: mol_type = other DNA; mol_type = other DNA
gactgggctcgatcaccgatg

SEQ ID NO: 35434 - DNA, 21 bp, synthetic construct
  source 1..21: mol_type = other DNA; mol_type = other DNA
gcagcgagcaccaatggcgtg

SEQ ID NO: 35435 - DNA, 21 bp, synthetic construct
  source 1..21: mol_type = other DNA; mol_type = other DNA
cgtgagcctggatgtaaagag

SEQ ID NO: 35436 - DNA, 21 bp, synthetic construct
  source 1..21: mol_type = other DNA; mol_type = other DNA
tgcacgtctaagactcctcac

SEQ ID NO: 35437 - DNA, 21 bp, synthetic construct
  source 1..21: mol_type = other DNA; mol_type = other DNA
ttctggaccggcaagattgag

SEQ ID NO: 35438 - DNA, 21 bp, synthetic construct
  source 1..21: mol_type = other DNA; mol_type = other DNA
tccgacggtagcagcaagtgg

SEQ ID NO: 35439 - DNA, 21 bp, synthetic construct
  source 1..21: mol_type = other DNA; mol_type = other DNA
agaggggaaggggttaggtgg

SEQ ID NO: 35440 - DNA, 21 bp, synthetic construct
  source 1..21: mol_type = other DNA; mol_type = other DNA
tggttcacaggtcgacatgat

SEQ ID NO: 35441 - DNA, 21 bp, synthetic construct
  source 1..21: mol_type = other DNA; mol_type = other DNA
actaactccacgcatggtatt

SEQ ID NO: 35442 - DNA, 21 bp, synthetic construct
  source 1..21: mol_type = other DNA; mol_type = other DNA
cgaggtgagttccacagctac

SEQ ID NO: 35443 - DNA, 21 bp, synthetic construct
  source 1..21: mol_type = other DNA; mol_type = other DNA
ttctcacgtagcgggtataac

SEQ ID NO: 35444 - DNA, 21 bp, synthetic construct
  source 1..21: mol_type = other DNA; mol_type = other DNA
gacgagaacgccttcccgtac

SEQ ID NO: 35445 - DNA, 21 bp, synthetic construct
  source 1..21: mol_type = other DNA; mol_type = other DNA
tatcagagacagtgtgaatca

SEQ ID NO: 35446 - DNA, 21 bp, synthetic construct
  source 1..21: mol_type = other DNA; mol_type = other DNA
ggagttgagatggtacgctgg

SEQ ID NO: 35447 - DNA, 21 bp, synthetic construct
  source 1..21: mol_type = other DNA; mol_type = other DNA
aggtcagaattcacgccatat

SEQ ID NO: 35448 - DNA, 21 bp, synthetic construct
  source 1..21: mol_type = other DNA; mol_type = other DNA
atcccctcctcggtcaagtgg

SEQ ID NO: 35449 - DNA, 21 bp, synthetic construct
  source 1..21: mol_type = other DNA; mol_type = other DNA
ttgcgtgacggtagtccgcca

SEQ ID NO: 35450 - DNA, 21 bp, synthetic construct
  source 1..21: mol_type = other DNA; mol_type = other DNA
agatcggaatttcaccctttc

SEQ ID NO: 35451 - DNA, 21 bp, synthetic construct
  source 1..21: mol_type = other DNA; mol_type = other DNA
tattggtcaggaattcacaac

SEQ ID NO: 35452 - DNA, 21 bp, synthetic construct
  source 1..21: mol_type = other DNA; mol_type = other DNA
acccgagacggtactaacgcc

SEQ ID NO: 35453 - DNA, 21 bp, synthetic construct
  source 1..21: mol_type = other DNA; mol_type = other DNA
cgcgaggactttcaaacatgg

SEQ ID NO: 35454 - DNA, 21 bp, synthetic construct
  source 1..21: mol_type = other DNA; mol_type = other DNA
attggaggcaaatgtccattc

SEQ ID NO: 35455 - DNA, 21 bp, synthetic construct
  source 1..21: mol_type = other DNA; mol_type = other DNA
atcggctcgacgaacgggatt

SEQ ID NO: 35456 - DNA, 21 bp, synthetic construct
  source 1..21: mol_type = other DNA; mol_type = other DNA
tcttacgccaaatcactgcta

SEQ ID NO: 35457 - DNA, 21 bp, synthetic construct
  source 1..21: mol_type = other DNA; mol_type = other DNA
tacgtgcgctctgatcagacc

SEQ ID NO: 35458 - DNA, 21 bp, synthetic construct
  source 1..21: mol_type = other DNA; mol_type = other DNA
tggttgaaatcccagtcctac

SEQ ID NO: 35459 - DNA, 21 bp, synthetic construct
  source 1..21: mol_type = other DNA; mol_type = other DNA
gccggggccactagtacgtgg

SEQ ID NO: 35460 - DNA, 21 bp, synthetic construct
  source 1..21: mol_type = other DNA; mol_type = other DNA
tacatggtcgacgcgtttgtc

SEQ ID NO: 35461 - DNA, 21 bp, synthetic construct
  source 1..21: mol_type = other DNA; mol_type = other DNA
tggctaaaaagtcaaagttat

SEQ ID NO: 35462 - DNA, 21 bp, synthetic construct
  source 1..21: mol_type = other DNA; mol_type = other DNA
ggagccaatactagcagatgg

SEQ ID NO: 35463 - DNA, 21 bp, synthetic construct
  source 1..21: mol_type = other DNA; mol_type = other DNA
tactcgcgaatgaacatgaac

SEQ ID NO: 35464 - DNA, 21 bp, synthetic construct
  source 1..21: mol_type = other DNA; mol_type = other DNA
cgcgacgctgttagtcgatgg

SEQ ID NO: 35465 - DNA, 21 bp, synthetic construct
  source 1..21: mol_type = other DNA; mol_type = other DNA
tgggaatccactaacggtatc

SEQ ID NO: 35466 - DNA, 21 bp, synthetic construct
  source 1..21: mol_type = other DNA; mol_type = other DNA
acatggaacggcgacaacgcg

SEQ ID NO: 35467 - DNA, 21 bp, synthetic construct
  source 1..21: mol_type = other DNA; mol_type = other DNA
gtcgatgaatggtccacgttt

SEQ ID NO: 35468 - DNA, 21 bp, synthetic construct
  source 1..21: mol_type = other DNA; mol_type = other DNA
tactggaccggcatgatcagt

SEQ ID NO: 35469 - DNA, 21 bp, synthetic construct
  source 1..21: mol_type = other DNA; mol_type = other DNA
cgaggggatagccctctgtgg

SEQ ID NO: 35470 - DNA, 21 bp, synthetic construct
  source 1..21: mol_type = other DNA; mol_type = other DNA
cttaattctacgaatggggtt

SEQ ID NO: 35471 - DNA, 21 bp, synthetic construct
  source 1..21: mol_type = other DNA; mol_type = other DNA
ttctggagtggtacattcgaa

SEQ ID NO: 35472 - DNA, 21 bp, synthetic construct
  source 1..21: mol_type = other DNA; mol_type = other DNA
tactggtcgggtcagcatgag

SEQ ID NO: 35473 - DNA, 21 bp, synthetic construct
  source 1..21: mol_type = other DNA; mol_type = other DNA
tgcaaaccacggtcaggagag

SEQ ID NO: 35474 - DNA, 21 bp, synthetic construct
  source 1..21: mol_type = other DNA; mol_type = other DNA
tcaatctcaacaaacggtgta

SEQ ID NO: 35475 - DNA, 21 bp, synthetic construct
  source 1..21: mol_type = other DNA; mol_type = other DNA
acgtggaccggggacatcccc

SEQ ID NO: 35476 - DNA, 21 bp, synthetic construct
  source 1..21: mol_type = other DNA; mol_type = other DNA
agtatgcaggatcgacactgg

SEQ ID NO: 35477 - DNA, 21 bp, synthetic construct
  source 1..21: mol_type = other DNA; mol_type = other DNA
aatcttgctagtgcaggctgg

SEQ ID NO: 35478 - DNA, 21 bp, synthetic construct
  source 1..21: mol_type = other DNA; mol_type = other DNA
ggcggcgaatatgtccgatgg

SEQ ID NO: 35479 - DNA, 21 bp, synthetic construct
  source 1..21: mol_type = other DNA; mol_type = other DNA
aaatccgactatatgagcttc

SEQ ID NO: 35480 - DNA, 21 bp, synthetic construct
  source 1..21: mol_type = other DNA; mol_type = other DNA
tttagtcggatgaaccacaac

SEQ ID NO: 35481 - DNA, 21 bp, synthetic construct
  source 1..21: mol_type = other DNA; mol_type = other DNA
acgcgctacggagaaaacgct

SEQ ID NO: 35482 - DNA, 21 bp, synthetic construct
  source 1..21: mol_type = other DNA; mol_type = other DNA
ttctctcgggtgaattataac

SEQ ID NO: 35483 - DNA, 21 bp, synthetic construct
  source 1..21: mol_type = other DNA; mol_type = other DNA
ccgtggtccaccaatggtatc

SEQ ID NO: 35484 - DNA, 21 bp, synthetic construct
  source 1..21: mol_type = other DNA; mol_type = other DNA
cggagtgagttccatcccttt

SEQ ID NO: 35485 - DNA, 21 bp, synthetic construct
  source 1..21: mol_type = other DNA; mol_type = other DNA
gcgtacgccaggtctccgctg

SEQ ID NO: 35486 - DNA, 21 bp, synthetic construct
  source 1..21: mol_type = other DNA; mol_type = other DNA
tattcgagacacggacttaat

SEQ ID NO: 35487 - DNA, 21 bp, synthetic construct
  source 1..21: mol_type = other DNA; mol_type = other DNA
cgcacagtacacacgtatcct

SEQ ID NO: 35488 - DNA, 21 bp, synthetic construct
  source 1..21: mol_type = other DNA; mol_type = other DNA
tttcataaaatgaattacaat

SEQ ID NO: 35489 - DNA, 21 bp, synthetic construct
  source 1..21: mol_type = other DNA; mol_type = other DNA
tatcaatcttcaaacggcgtt

SEQ ID NO: 35490 - DNA, 21 bp, synthetic construct
  source 1..21: mol_type = other DNA; mol_type = other DNA
gcaggaatggaccgtggatgg

SEQ ID NO: 35491 - DNA, 21 bp, synthetic construct
  source 1..21: mol_type = other DNA; mol_type = other DNA
cgcggagagacctcatcttgg

SEQ ID NO: 35492 - DNA, 21 bp, synthetic construct
  source 1..21: mol_type = other DNA; mol_type = other DNA
cggatgtcgactaacgggatt

SEQ ID NO: 35493 - DNA, 21 bp, synthetic construct
  source 1..21: mol_type = other DNA; mol_type = other DNA
tactggagctcggtccgtgac

SEQ ID NO: 35494 - DNA, 21 bp, synthetic construct
  source 1..21: mol_type = other DNA; mol_type = other DNA
tatttttcggggcggagtttg

SEQ ID NO: 35495 - DNA, 21 bp, synthetic construct
  source 1..21: mol_type = other DNA; mol_type = other DNA
ggaggtcccacatgtaaattt

SEQ ID NO: 35496 - DNA, 21 bp, synthetic construct
  source 1..21: mol_type = other DNA; mol_type = other DNA
ttacgtaatggtacgggacct

SEQ ID NO: 35497 - DNA, 21 bp, synthetic construct
  source 1..21: mol_type = other DNA; mol_type = other DNA
cgcacggagttccacagtttt

SEQ ID NO: 35498 - DNA, 21 bp, synthetic construct
  source 1..21: mol_type = other DNA
tacagtcgccataatttcaac

SEQ ID NO: 35499 - DNA, 21 bp, synthetic construct
  source 1..21: mol_type = other DNA
ggttcaggtaatagtatttgg

SEQ ID NO: 35500 - DNA, 21 bp, synthetic construct
  source 1..21: mol_type = other DNA; mol_type = other DNA
tggtggcacggcaagcccgat

SEQ ID NO: 35501 - DNA, 21 bp, synthetic construct
  source 1..21: mol_type = other DNA; mol_type = other DNA
gtcgcacagaagggatgtgga

SEQ ID NO: 35502 - DNA, 21 bp, synthetic construct
  source 1..21: mol_type = other DNA; mol_type = other DNA
tactacagcggtcgactgtca

SEQ ID NO: 35503 - DNA, 21 bp, synthetic construct
  source 1..21: mol_type = other DNA; mol_type = other DNA
gtatctgatttcacgggatac

SEQ ID NO: 35504 - DNA, 21 bp, synthetic construct
  source 1..21: mol_type = other DNA; mol_type = other DNA
gggggtgagtatgtgagctac

SEQ ID NO: 35505 - DNA, 21 bp, synthetic construct
  source 1..21: mol_type = other DNA; mol_type = other DNA
ttctcacgtgcgaaccacaat

SEQ ID NO: 35506 - DNA, 21 bp, synthetic construct
  source 1..21: mol_type = other DNA; mol_type = other DNA
tactcgaaaaatgggtggaac

SEQ ID NO: 35507 - DNA, 21 bp, synthetic construct
  source 1..21: mol_type = other DNA
cgcgatgaattcgttagtttc

SEQ ID NO: 35508 - DNA, 21 bp, synthetic construct
  source 1..21: mol_type = other DNA
ctttggtccggcatgggccca

SEQ ID NO: 35509 - DNA, 21 bp, synthetic construct
  source 1..21: mol_type = other DNA
aaaagtgatcatgtcaggtgg

SEQ ID NO: 35510 - DNA, 21 bp, synthetic construct
  source 1..21: mol_type = other DNA
tattatagcactaatggggta

SEQ ID NO: 35511 - DNA, 21 bp, synthetic construct
  source 1..21: mol_type = other DNA
cacgactcgacgcatggtcgt

SEQ ID NO: 35512 - DNA, 21 bp, synthetic construct
  source 1..21: mol_type = other DNA
tgcaagtcggataccaggtgg

SEQ ID NO: 35513 - DNA, 21 bp, synthetic construct
  source 1..21: mol_type = other DNA; mol_type = other DNA
tactcgagacaaaatcacaac

SEQ ID NO: 35514 - DNA, 21 bp, synthetic construct
  source 1..21: mol_type = other DNA; mol_type = other DNA
tgggtacgtagtgacgtccga

SEQ ID NO: 35515 - DNA, 21 bp, synthetic construct
  source 1..21: mol_type = other DNA; mol_type = other DNA
acccgcgaaggggacgtccca

SEQ ID NO: 35516 - DNA, 21 bp, synthetic construct
  source 1..21: mol_type = other DNA; mol_type = other DNA
attcccgatacatgctgcgtt

SEQ ID NO: 35517 - DNA, 21 bp, synthetic construct
  source 1..21: mol_type = other DNA; mol_type = other DNA
cagatggcgtcgcaggcttgg

SEQ ID NO: 35518 - DNA, 21 bp, synthetic construct
  source 1..21: mol_type = other DNA; mol_type = other DNA
tactcgaaatcaaataccaat

SEQ ID NO: 35519 - DNA, 21 bp, synthetic construct
  source 1..21: mol_type = other DNA; mol_type = other DNA
gagctgagtagcccgaaatgg

SEQ ID NO: 35520 - DNA, 21 bp, synthetic construct
  source 1..21: mol_type = other DNA; mol_type = other DNA
tggtggacgggtacggtgagt

SEQ ID NO: 35521 - DNA, 21 bp, synthetic construct
  source 1..21: mol_type = other DNA; mol_type = other DNA
tgcaaaccacaaaccattggt

SEQ ID NO: 35522 - DNA, 21 bp, synthetic construct
  source 1..21: mol_type = other DNA; mol_type = other DNA
gattacgagagccggaaatgg

SEQ ID NO: 35523 - DNA, 21 bp, synthetic construct
  source 1..21: mol_type = other DNA; mol_type = other DNA
atgaggaacacacactgtgac

SEQ ID NO: 35524 - DNA, 21 bp, synthetic construct
  source 1..21: mol_type = other DNA; mol_type = other DNA
ttctctaggatgaattacaac

SEQ ID NO: 35525 - DNA, 21 bp, synthetic construct
  source 1..21: mol_type = other DNA; mol_type = other DNA
aatttagagtcgcataaatgg

SEQ ID NO: 35526 - DNA, 21 bp, synthetic construct
  source 1..21: mol_type = other DNA; mol_type = other DNA
ggaatggagcatgtacgttgg

SEQ ID NO: 35527 - DNA, 21 bp, synthetic construct
  source 1..21: mol_type = other DNA; mol_type = other DNA
cacgattcctcgaatggagtg

SEQ ID NO: 35528 - DNA, 21 bp, synthetic construct
  source 1..21: mol_type = other DNA; mol_type = other DNA
tcaggatatgatagaggttgg

SEQ ID NO: 35529 - DNA, 21 bp, synthetic construct
  source 1..21: mol_type = other DNA; mol_type = other DNA
aaagatgattttcagagtttc

SEQ ID NO: 35530 - DNA, 21 bp, synthetic construct
  source 1..21: mol_type = other DNA; mol_type = other DNA
ttctgggggggtataaaagag

SEQ ID NO: 35531 - DNA, 21 bp, synthetic construct
  source 1..21: mol_type = other DNA; mol_type = other DNA
tgggtttccacaaacggtgtt

SEQ ID NO: 35532 - DNA, 21 bp, synthetic construct
  source 1..21: mol_type = other DNA; mol_type = other DNA
acttgggacggcatgcaggct

SEQ ID NO: 35533 - DNA, 21 bp, synthetic construct
  source 1..21: mol_type = other DNA; mol_type = other DNA
gcaccctacgacagggggtgg

SEQ ID NO: 35534 - DNA, 21 bp, synthetic construct
  source 1..21: mol_type = other DNA; mol_type = other DNA
atagacgagttccgctcgtgg

SEQ ID NO: 35535 - DNA, 21 bp, synthetic construct
  source 1..21: mol_type = other DNA; mol_type = other DNA
cgggagaatagcgtatattgg

SEQ ID NO: 35536 - DNA, 21 bp, synthetic construct
  source 1..21: mol_type = other DNA; mol_type = other DNA
caatcgtctactaacggggtc

SEQ ID NO: 35537 - DNA, 21 bp, synthetic construct
  source 1..21: mol_type = other DNA; mol_type = other DNA
tggcagagtagcaacggggta

SEQ ID NO: 35538 - DNA, 21 bp, synthetic construct
  source 1..21: mol_type = other DNA; mol_type = other DNA
cgtggggattctagttattgg

SEQ ID NO: 35539 - DNA, 21 bp, synthetic construct
  source 1..21: mol_type = other DNA; mol_type = other DNA
tatagccgacataattctaac

SEQ ID NO: 35540 - DNA, 21 bp, synthetic construct
  source 1..21: mol_type = other DNA; mol_type = other DNA
ggcatcggatgcacaaagctt

SEQ ID NO: 35541 - DNA, 21 bp, synthetic construct
  source 1..21: mol_type = other DNA; mol_type = other DNA
atgtatgccttttccaaggag

SEQ ID NO: 35542 - DNA, 21 bp, synthetic construct
  source 1..21: mol_type = other DNA; mol_type = other DNA
aaagacggattgagtcgttgg

SEQ ID NO: 35543 - DNA, 21 bp, synthetic construct
  source 1..21: mol_type = other DNA; mol_type = other DNA
tggcctttcgggatggacgct

SEQ ID NO: 35544 - DNA, 21 bp, synthetic construct
  source 1..21: mol_type = other DNA; mol_type = other DNA
cgagaagacacgatatactgg

SEQ ID NO: 35545 - DNA, 21 bp, synthetic construct
  source 1..21: mol_type = other DNA; mol_type = other DNA
aagtttgacggcactcccagt

SEQ ID NO: 35546 - DNA, 21 bp, synthetic construct
  source 1..21: mol_type = other DNA; mol_type = other DNA
aaggatgaatttcaaacatat

SEQ ID NO: 35547 - DNA, 21 bp, synthetic construct
  source 1..21: mol_type = other DNA; mol_type = other DNA
tacgcccggggcaattttaac

SEQ ID NO: 35548 - DNA, 21 bp, synthetic construct
  source 1..21: mol_type = other DNA; mol_type = other DNA
ttcttcactggtgaaagggct

SEQ ID NO: 35549 - DNA, 21 bp, synthetic construct
  source 1..21: mol_type = other DNA; mol_type = other DNA
ggtggagaaacgagtctatgg

SEQ ID NO: 35550 - DNA, 21 bp, synthetic construct
  source 1..21: mol_type = other DNA; mol_type = other DNA
tattggggcggggttgtcagt

SEQ ID NO: 35551 - DNA, 21 bp, synthetic construct
  source 1..21: mol_type = other DNA; mol_type = other DNA
cgtggcgaattcaccagctat

SEQ ID NO: 35552 - DNA, 21 bp, synthetic construct
  source 1..21: mol_type = other DNA; mol_type = other DNA
cgtgatgaatttcgggcatac

SEQ ID NO: 35553 - DNA, 21 bp, synthetic construct
  source 1..21: mol_type = other DNA; mol_type = other DNA
ggggctaacacgtcacgttgg

SEQ ID NO: 35554 - DNA, 21 bp, synthetic construct
  source 1..21: mol_type = other DNA; mol_type = other DNA
gtacttgggcagggaaattgg

SEQ ID NO: 35555 - DNA, 21 bp, synthetic construct
  source 1..21: mol_type = other DNA; mol_type = other DNA
cctggcggaacttcaacctgg

SEQ ID NO: 35556 - DNA, 21 bp, synthetic construct
  source 1..21: mol_type = other DNA; mol_type = other DNA
ggctctggcactaatgcgtgg

SEQ ID NO: 35557 - DNA, 21 bp, synthetic construct
  source 1..21: mol_type = other DNA; mol_type = other DNA
ctctggagcggggaggcacca

SEQ ID NO: 35558 - DNA, 21 bp, synthetic construct
  source 1..21: mol_type = other DNA; mol_type = other DNA
ttgtggtcgggtattggcccc

SEQ ID NO: 35559 - DNA, 21 bp, synthetic construct
  source 1..21: mol_type = other DNA; mol_type = other DNA
gcagaatccaccaatggggtg

SEQ ID NO: 35560 - DNA, 21 bp, synthetic construct
  source 1..21: mol_type = other DNA; mol_type = other DNA
acctgggaaggtacggcggcc

SEQ ID NO: 35561 - DNA, 21 bp, synthetic construct
  source 1..21: mol_type = other DNA; mol_type = other DNA
tacgccaggcacggtcacaac

SEQ ID NO: 35562 - DNA, 21 bp, synthetic construct
  source 1..21: mol_type = other DNA; mol_type = other DNA
ggaggggaatcaagcatttgg

SEQ ID NO: 35563 - DNA, 21 bp, synthetic construct
  source 1..21: mol_type = other DNA; mol_type = other DNA
ttgtgggacggaacgcgtgcc

SEQ ID NO: 35564 - DNA, 21 bp, synthetic construct
  source 1..21: mol_type = other DNA; mol_type = other DNA
tgtaaagtgatctctcctcct

SEQ ID NO: 35565 - DNA, 21 bp, synthetic construct
  source 1..21: mol_type = other DNA; mol_type = other DNA
gacttgagggcggtctcgtgg

SEQ ID NO: 35566 - DNA, 21 bp, synthetic construct
  source 1..21: mol_type = other DNA; mol_type = other DNA
tggtggacgggctacgttgac

SEQ ID NO: 35567 - DNA, 21 bp, synthetic construct
  source 1..21: mol_type = other DNA; mol_type = other DNA
tggacccctatgtgtaaagct

SEQ ID NO: 35568 - DNA, 21 bp, synthetic construct
  source 1..21: mol_type = other DNA; mol_type = other DNA
aacgatggatcttcgtcatac

SEQ ID NO: 35569 - DNA, 21 bp, synthetic construct
  source 1..21: mol_type = other DNA; mol_type = other DNA
tactttgcaggtcgattggca

SEQ ID NO: 35570 - DNA, 21 bp, synthetic construct
  source 1..21: mol_type = other DNA
tactggtctggaactaatgct

SEQ ID NO: 35571 - DNA, 21 bp, synthetic construct
  source 1..21: mol_type = other DNA
cgttctgaattccgtacgtac

SEQ ID NO: 35572 - DNA, 21 bp, synthetic construct
  source 1..21: mol_type = other DNA
ttttggaccggtatccccgat

SEQ ID NO: 35573 - DNA, 21 bp, synthetic construct
  source 1..21: mol_type = other DNA; mol_type = other DNA
aaatatgacggcactagcgct

SEQ ID NO: 35574 - DNA, 21 bp, synthetic construct
  source 1..21: mol_type = other DNA; mol_type = other DNA
ggtggtgctggggtcaggtgg

SEQ ID NO: 35575 - DNA, 21 bp, synthetic construct
  source 1..21: mol_type = other DNA; mol_type = other DNA
tacgcaagacatgggtataac

SEQ ID NO: 35576 - DNA, 21 bp, synthetic construct
  source 1..21: mol_type = other DNA; mol_type = other DNA
tgccgggatgtgaagcaaggg

SEQ ID NO: 35577 - DNA, 21 bp, synthetic construct
  source 1..21: mol_type = other DNA; mol_type = other DNA
agaggagagtttcatagctac

SEQ ID NO: 35578 - DNA, 21 bp, synthetic construct
  source 1..21: mol_type = other DNA; mol_type = other DNA
tgtaagatgtcgtgcgccgag

SEQ ID NO: 35579 - DNA, 21 bp, synthetic construct
  source 1..21: mol_type = other DNA; mol_type = other DNA
ttgaattcaacaaatgggatc

SEQ ID NO: 35580 - DNA, 21 bp, synthetic construct
  source 1..21: mol_type = other DNA; mol_type = other DNA
gagatggaaagtgtccgctgg

SEQ ID NO: 35581 - DNA, 21 bp, synthetic construct
  source 1..21: mol_type = other DNA; mol_type = other DNA
tgttcgaagcgcccttgcggg

SEQ ID NO: 35582 - DNA, 21 bp, synthetic construct
  source 1..21: mol_type = other DNA; mol_type = other DNA
cgtatcacccacccatactcc

SEQ ID NO: 35583 - DNA, 21 bp, synthetic construct
  source 1..21: mol_type = other DNA; mol_type = other DNA
tatgcacgtcatgggcataat

SEQ ID NO: 35584 - DNA, 21 bp, synthetic construct
  source 1..21: mol_type = other DNA; mol_type = other DNA
tattggagctccgtccgcgaa

SEQ ID NO: 35585 - DNA, 21 bp, synthetic construct
  source 1..21: mol_type = other DNA; mol_type = other DNA
ctctggaccggcgtgggcccc

SEQ ID NO: 35586 - DNA, 21 bp, synthetic construct
  source 1..21: mol_type = other DNA; mol_type = other DNA
ggggggaacggcagctcgtgg

SEQ ID NO: 35587 - DNA, 21 bp, synthetic construct
  source 1..21: mol_type = other DNA; mol_type = other DNA
agagacgaaacctcattttgg

SEQ ID NO: 35588 - DNA, 21 bp, synthetic construct
  source 1..21: mol_type = other DNA; mol_type = other DNA
acagtttggggagacccggct

SEQ ID NO: 35589 - DNA, 21 bp, synthetic construct
  source 1..21: mol_type = other DNA; mol_type = other DNA
cgtggtgaatcggtaaggtgg

SEQ ID NO: 35590 - DNA, 21 bp, synthetic construct
  source 1..21: mol_type = other DNA; mol_type = other DNA
ttatggagtggaatggggcct

SEQ ID NO: 35591 - DNA, 21 bp, synthetic construct
  source 1..21: mol_type = other DNA; mol_type = other DNA
tactcacgattgaaccacaat

SEQ ID NO: 35592 - DNA, 21 bp, synthetic construct
  source 1..21: mol_type = other DNA; mol_type = other DNA
ttctggtccgggcaacgtgat

SEQ ID NO: 35593 - DNA, 21 bp, synthetic construct
  source 1..21: mol_type = other DNA; mol_type = other DNA
acttggaatggagataatgcc

SEQ ID NO: 35594 - DNA, 21 bp, synthetic construct
  source 1..21: mol_type = other DNA; mol_type = other DNA
gatatgggaggatatgattgg

SEQ ID NO: 35595 - DNA, 21 bp, synthetic construct
  source 1..21: mol_type = other DNA; mol_type = other DNA
cctttgagagattgtgttaag

SEQ ID NO: 35596 - DNA, 21 bp, synthetic construct
  source 1..21: mol_type = other DNA; mol_type = other DNA
tactggtctagtgtaagagag

SEQ ID NO: 35597 - DNA, 21 bp, synthetic construct
  source 1..21: mol_type = other DNA; mol_type = other DNA
gttgatgactttaaggttttt

SEQ ID NO: 35598 - DNA, 21 bp, synthetic construct
  source 1..21: mol_type = other DNA; mol_type = other DNA
cttaaggatggtaccgcatct

SEQ ID NO: 35599 - DNA, 21 bp, synthetic construct
  source 1..21: mol_type = other DNA; mol_type = other DNA
aacttggcctccgctggttgg

SEQ ID NO: 35600 - DNA, 21 bp, synthetic construct
  source 1..21: mol_type = other DNA; mol_type = other DNA
ataccggaacgctgccccaaa

SEQ ID NO: 35601 - DNA, 21 bp, synthetic construct
  source 1..21: mol_type = other DNA; mol_type = other DNA
tgtaaacctaagcagatagag

SEQ ID NO: 35602 - DNA, 21 bp, synthetic construct
  source 1..21: mol_type = other DNA; mol_type = other DNA
cggatggactcggtttcatgg

SEQ ID NO: 35603 - DNA, 21 bp, synthetic construct
  source 1..21: mol_type = other DNA; mol_type = other DNA
atgttgtcaagtaatacttgg

SEQ ID NO: 35604 - DNA, 21 bp, synthetic construct
  source 1..21: mol_type = other DNA; mol_type = other DNA
acgaaactcggggataatgct

SEQ ID NO: 35605 - DNA, 21 bp, synthetic construct
  source 1..21: mol_type = other DNA; mol_type = other DNA
tattcgcgggacgggtgtaac

SEQ ID NO: 35606 - DNA, 21 bp, synthetic construct
  source 1..21: mol_type = other DNA; mol_type = other DNA
cgtatggaagacgtatattgg

SEQ ID NO: 35607 - DNA, 21 bp, synthetic construct
  source 1..21: mol_type = other DNA; mol_type = other DNA
ttaatggatgggaccagtgct

SEQ ID NO: 35608 - DNA, 21 bp, synthetic construct
  source 1..21: mol_type = other DNA; mol_type = other DNA
cgcgacgagtatatgagttgg

SEQ ID NO: 35609 - DNA, 21 bp, synthetic construct
  source 1..21: mol_type = other DNA; mol_type = other DNA
aaatgggacggcactagcgct

SEQ ID NO: 35610 - DNA, 21 bp, synthetic construct
  source 1..21: mol_type = other DNA; mol_type = other DNA
aactcggagtttatgagctat

SEQ ID NO: 35611 - DNA, 21 bp, synthetic construct
  source 1..21: mol_type = other DNA; mol_type = other DNA
ggctgtggcactaagtatggc

SEQ ID NO: 35612 - DNA, 21 bp, synthetic construct
  source 1..21: mol_type = other DNA; mol_type = other DNA
agaacgccgacttgttacgga

SEQ ID NO: 35613 - DNA, 21 bp, synthetic construct
  source 1..21: mol_type = other DNA; mol_type = other DNA
acctggactggtgatataccg

SEQ ID NO: 35614 - DNA, 21 bp, synthetic construct
  source 1..21: mol_type = other DNA; mol_type = other DNA
aagtgggatggaacatctgca

SEQ ID NO: 35615 - DNA, 21 bp, synthetic construct
  source 1..21: mol_type = other DNA; mol_type = other DNA
tactcgcggtacaatgtgaac

SEQ ID NO: 35616 - DNA, 21 bp, synthetic construct
  source 1..21: mol_type = other DNA; mol_type = other DNA
attccaccgttataccaggta

SEQ ID NO: 35617 - DNA, 21 bp, synthetic construct
  source 1..21: mol_type = other DNA; mol_type = other DNA
agaggtgacagctcgtactgg

SEQ ID NO: 35618 - DNA, 21 bp, synthetic construct
  source 1..21: mol_type = other DNA; mol_type = other DNA
tacgtcaagtgggacagcggg

SEQ ID NO: 35619 - DNA, 21 bp, synthetic construct
  source 1..21: mol_type = other DNA; mol_type = other DNA
cgcttatatgatgcgtatcag

SEQ ID NO: 35620 - DNA, 21 bp, synthetic construct
  source 1..21: mol_type = other DNA; mol_type = other DNA
tggtggtcgggcactgccgcc

SEQ ID NO: 35621 - DNA, 21 bp, synthetic construct
  source 1..21: mol_type = other DNA; mol_type = other DNA
acatgggagggtgagggtccc

SEQ ID NO: 35622 - DNA, 21 bp, synthetic construct
  source 1..21: mol_type = other DNA; mol_type = other DNA
aagtacgatgggacatctgcg

SEQ ID NO: 35623 - DNA, 21 bp, synthetic construct
  source 1..21: mol_type = other DNA; mol_type = other DNA
tattctcgtggtaactttaac

SEQ ID NO: 35624 - DNA, 21 bp, synthetic construct
  source 1..21: mol_type = other DNA; mol_type = other DNA
tatttcgatggcacgcctgca

SEQ ID NO: 35625 - DNA, 21 bp, synthetic construct
  source 1..21: mol_type = other DNA; mol_type = other DNA
aaggacgaattccgtgcttat

SEQ ID NO: 35626 - DNA, 21 bp, synthetic construct
  source 1..21: mol_type = other DNA; mol_type = other DNA
acgagggatggaaccaatgcg

SEQ ID NO: 35627 - DNA, 21 bp, synthetic construct
  source 1..21: mol_type = other DNA; mol_type = other DNA
agagacgagacctcgttttgg

SEQ ID NO: 35628 - DNA, 21 bp, synthetic construct
  source 1..21: mol_type = other DNA; mol_type = other DNA
tatagccgatttaacattaac

SEQ ID NO: 35629 - DNA, 21 bp, synthetic construct
  source 1..21: mol_type = other DNA; mol_type = other DNA
tactataccggccaaatcgat

SEQ ID NO: 35630 - DNA, 21 bp, synthetic construct
  source 1..21: mol_type = other DNA; mol_type = other DNA
gattataccgggcggattgcc

SEQ ID NO: 35631 - DNA, 21 bp, synthetic construct
  source 1..21: mol_type = other DNA; mol_type = other DNA
gggtcgggcacggcgaagtgg

SEQ ID NO: 35632 - DNA, 21 bp, synthetic construct
  source 1..21: mol_type = other DNA; mol_type = other DNA
gatatgggttcaaacacgtgg

SEQ ID NO: 35633 - DNA, 21 bp, synthetic construct
  source 1..21: mol_type = other DNA; mol_type = other DNA
tataatcccggctgtaaggag

SEQ ID NO: 35634 - DNA, 21 bp, synthetic construct
  source 1..21: mol_type = other DNA; mol_type = other DNA
ttgttctcagggatgggacct

SEQ ID NO: 35635 - DNA, 21 bp, synthetic construct
  source 1..21: mol_type = other DNA; mol_type = other DNA
ggaggcggagtgagcaggtgg

SEQ ID NO: 35636 - DNA, 21 bp, synthetic construct
  source 1..21: mol_type = other DNA; mol_type = other DNA
agggatgaaggaacgtactgg

SEQ ID NO: 35637 - DNA, 21 bp, synthetic construct
  source 1..21: mol_type = other DNA; mol_type = other DNA
acatgggagggaacagctgct

SEQ ID NO: 35638 - DNA, 21 bp, synthetic construct
  source 1..21: mol_type = other DNA; mol_type = other DNA
aaattcgatgggacaccttcg

SEQ ID NO: 35639 - DNA, 21 bp, synthetic construct
  source 1..21: mol_type = other DNA; mol_type = other DNA
aaggtagagcacgtccggtgg

SEQ ID NO: 35640 - DNA, 21 bp, synthetic construct
  source 1..21: mol_type = other DNA; mol_type = other DNA
tatagcaggtatggacagaac

SEQ ID NO: 35641 - DNA, 21 bp, synthetic construct
  source 1..21: mol_type = other DNA; mol_type = other DNA
gattggacgggtaatgccgca

SEQ ID NO: 35642 - DNA, 21 bp, synthetic construct
  source 1..21: mol_type = other DNA; mol_type = other DNA
ataccccccctttatcaagtc

SEQ ID NO: 35643 - DNA, 21 bp, synthetic construct
  source 1..21: mol_type = other DNA; mol_type = other DNA
agagacgaatttagaccgtgg

SEQ ID NO: 35644 - DNA, 21 bp, synthetic construct
  source 1..21: mol_type = other DNA; mol_type = other DNA
acgcgagagggtgatgtaccg

SEQ ID NO: 35645 - DNA, 21 bp, synthetic construct
  source 1..21: mol_type = other DNA; mol_type = other DNA
tactcgcggttaggttataat

SEQ ID NO: 35646 - DNA, 21 bp, synthetic construct
  source 1..21: mol_type = other DNA; mol_type = other DNA
tcgatgcaagaccgtatttgg

SEQ ID NO: 35647 - DNA, 21 bp, synthetic construct
  source 1..21: mol_type = other DNA; mol_type = other DNA
cggagcgagtttaggacatat

SEQ ID NO: 35648 - DNA, 21 bp, synthetic construct
  source 1..21: mol_type = other DNA; mol_type = other DNA
tatagtaagtatggcttcaat

SEQ ID NO: 35649 - DNA, 21 bp, synthetic construct
  source 1..21: mol_type = other DNA; mol_type = other DNA
gattggtatggaaatgcggca

SEQ ID NO: 35650 - DNA, 21 bp, synthetic construct
  source 1..21: mol_type = other DNA; mol_type = other DNA
tactcgtatgcaggtggcgga

SEQ ID NO: 35651 - DNA, 21 bp, synthetic construct
  source 1..21: mol_type = other DNA; mol_type = other DNA
ataccggacacgtgttgtgtc

SEQ ID NO: 35652 - DNA, 21 bp, synthetic construct
  source 1..21: mol_type = other DNA; mol_type = other DNA
atgagggacggaaccatagct

SEQ ID NO: 35653 - DNA, 21 bp, synthetic construct
  source 1..21: mol_type = other DNA; mol_type = other DNA
attgaacgccgtggctgggac

SEQ ID NO: 35654 - DNA, 21 bp, synthetic construct
  source 1..21: mol_type = other DNA; mol_type = other DNA
tacgagcctggctgcaagccg

SEQ ID NO: 35655 - DNA, 21 bp, synthetic construct
  source 1..21: mol_type = other DNA; mol_type = other DNA
ttcttcagcactaatggagtt

SEQ ID NO: 35656 - DNA, 21 bp, synthetic construct
  source 1..21: mol_type = other DNA; mol_type = other DNA
attccctccaagtgcccgttc

SEQ ID NO: 35657 - DNA, 21 bp, synthetic construct
  source 1..21: mol_type = other DNA; mol_type = other DNA
ttatggagcggagagaacgct

SEQ ID NO: 35658 - DNA, 21 bp, synthetic construct
  source 1..21: mol_type = other DNA; mol_type = other DNA
tgcaaggactctgcccgtttg

SEQ ID NO: 35659 - DNA, 21 bp, synthetic construct
  source 1..21: mol_type = other DNA; mol_type = other DNA
tattggcatggcaagccggaa

SEQ ID NO: 35660 - DNA, 21 bp, synthetic construct
  source 1..21: mol_type = other DNA; mol_type = other DNA
acgagatggggagatgaggct

SEQ ID NO: 35661 - DNA, 21 bp, synthetic construct
  source 1..21: mol_type = other DNA; mol_type = other DNA
atgcgggatgggtccaacgcg

SEQ ID NO: 35662 - DNA, 21 bp, synthetic construct
  source 1..21: mol_type = other DNA; mol_type = other DNA
ggcggagagagtagcgtctgg

SEQ ID NO: 35663 - DNA, 21 bp, synthetic construct
  source 1..21: mol_type = other DNA; mol_type = other DNA
gcatatgcgcgtagcccatta

SEQ ID NO: 35664 - DNA, 21 bp, synthetic construct
  source 1..21: mol_type = other DNA; mol_type = other DNA
gtcgacgatttcaaagtattc

SEQ ID NO: 35665 - DNA, 21 bp, synthetic construct
  source 1..21: mol_type = other DNA; mol_type = other DNA
ggaggagccacaagtagatgg

SEQ ID NO: 35666 - DNA, 21 bp, synthetic construct
  source 1..21: mol_type = other DNA; mol_type = other DNA
cgtatgagtagcggtgtgtgg

SEQ ID NO: 35667 - DNA, 21 bp, synthetic construct
  source 1..21: mol_type = other DNA; mol_type = other DNA
cgggatgacttccaccccttt

SEQ ID NO: 35668 - DNA, 21 bp, synthetic construct
  source 1..21: mol_type = other DNA; mol_type = other DNA
tttggtcctcccacacctgac

SEQ ID NO: 35669 - DNA, 21 bp, synthetic construct
  source 1..21: mol_type = other DNA; mol_type = other DNA
tactttgacggtaccccggct

SEQ ID NO: 35670 - DNA, 21 bp, synthetic construct
  source 1..21: mol_type = other DNA; mol_type = other DNA
ctttttgacggaacttacgcg

SEQ ID NO: 35671 - DNA, 21 bp, synthetic construct
  source 1..21: mol_type = other DNA; mol_type = other DNA
atgtggaacggcacaccttca

SEQ ID NO: 35672 - DNA, 21 bp, synthetic construct
  source 1..21: mol_type = other DNA; mol_type = other DNA
ttcacgccaatgtgcaaagcg

SEQ ID NO: 35673 - DNA, 21 bp, synthetic construct
  source 1..21: mol_type = other DNA; mol_type = other DNA
tactggagtggacagcaggcc

SEQ ID NO: 35674 - DNA, 21 bp, synthetic construct
  source 1..21: mol_type = other DNA; mol_type = other DNA
ttcttcagcggtagacacgag

SEQ ID NO: 35675 - DNA, 21 bp, synthetic construct
  source 1..21: mol_type = other DNA; mol_type = other DNA
ctattcagtggcatgggccca

SEQ ID NO: 35676 - DNA, 21 bp, synthetic construct
  source 1..21: mol_type = other DNA; mol_type = other DNA
atgtgggatggaacatttgct

SEQ ID NO: 35677 - DNA, 21 bp, synthetic construct
  source 1..21: mol_type = other DNA; mol_type = other DNA
tattttgcaggtgtcgttagc

SEQ ID NO: 35678 - DNA, 21 bp, synthetic construct
  source 1..21: mol_type = other DNA; mol_type = other DNA
agatccgagttcacgccatat

SEQ ID NO: 35679 - DNA, 21 bp, synthetic construct
  source 1..21: mol_type = other DNA; mol_type = other DNA
aaggaggacttcttgtcatgg

SEQ ID NO: 35680 - DNA, 21 bp, synthetic construct
  source 1..21: mol_type = other DNA; mol_type = other DNA
gattggcatgggctcatcgcg

SEQ ID NO: 35681 - DNA, 21 bp, synthetic construct
  source 1..21: mol_type = other DNA; mol_type = other DNA
cgtcttgattcagctaactgg

SEQ ID NO: 35682 - DNA, 21 bp, synthetic construct
  source 1..21: mol_type = other DNA; mol_type = other DNA
acccgctggggggacgaagcg

SEQ ID NO: 35683 - DNA, 21 bp, synthetic construct
  source 1..21: mol_type = other DNA; mol_type = other DNA
tatttcacaggattgcacaac

SEQ ID NO: 35684 - DNA, 21 bp, synthetic construct
  source 1..21: mol_type = other DNA; mol_type = other DNA
tgtaagccgcggcaaggcgag

SEQ ID NO: 35685 - DNA, 21 bp, synthetic construct
  source 1..21: mol_type = other DNA; mol_type = other DNA
atgcgcgatgggactatcgcg

SEQ ID NO: 35686 - DNA, 21 bp, synthetic construct
  source 1..21: mol_type = other DNA; mol_type = other DNA
gacatgaggatgggtacctgg

SEQ ID NO: 35687 - DNA, 21 bp, synthetic construct
  source 1..21: mol_type = other DNA; mol_type = other DNA
cgcgaagaccacacgtattgg

SEQ ID NO: 35688 - DNA, 21 bp, synthetic construct
  source 1..21: mol_type = other DNA; mol_type = other DNA
gaactcggaagtcacacctgg

SEQ ID NO: 35689 - DNA, 21 bp, synthetic construct
  source 1..21: mol_type = other DNA; mol_type = other DNA
gaaatggagtcgacgaagtgg

SEQ ID NO: 35690 - DNA, 21 bp, synthetic construct
  source 1..21: mol_type = other DNA; mol_type = other DNA
tataacgcgggtcgcgagtgc

SEQ ID NO: 35691 - DNA, 21 bp, synthetic construct
  source 1..21: mol_type = other DNA; mol_type = other DNA
cgcgacgattttcgcacgtgg

SEQ ID NO: 35692 - DNA, 21 bp, synthetic construct
  source 1..21: mol_type = other DNA; mol_type = other DNA
ctttggtcgggcgaaaatgca

SEQ ID NO: 35693 - DNA, 21 bp, synthetic construct
  source 1..21: mol_type = other DNA; mol_type = other DNA
tactactctacaaacggggtc

SEQ ID NO: 35694 - DNA, 21 bp, synthetic construct
  source 1..21: mol_type = other DNA; mol_type = other DNA
atcggggagcgcggttgggac

SEQ ID NO: 35695 - DNA, 21 bp, synthetic construct
  source 1..21: mol_type = other DNA; mol_type = other DNA
cgggatgagtttcggggatgg

SEQ ID NO: 35696 - DNA, 21 bp, synthetic construct
  source 1..21: mol_type = other DNA; mol_type = other DNA
ttcgatggagcgagccgttgg

SEQ ID NO: 35697 - DNA, 21 bp, synthetic construct
  source 1..21: mol_type = other DNA; mol_type = other DNA
ggcgacgacttcgtacgttgg

SEQ ID NO: 35698 - DNA, 21 bp, synthetic construct
  source 1..21: mol_type = other DNA; mol_type = other DNA
ggttcggagttccacacgtgg

SEQ ID NO: 35699 - DNA, 21 bp, synthetic construct
  source 1..21: mol_type = other DNA; mol_type = other DNA
acctgggatggcacgccagca

SEQ ID NO: 35700 - DNA, 21 bp, synthetic construct
  source 1..21: mol_type = other DNA; mol_type = other DNA
aaagacgattactctggatat

SEQ ID NO: 35701 - DNA, 21 bp, synthetic construct
  source 1..21: mol_type = other DNA; mol_type = other DNA
aaaagtgactggactccctac

SEQ ID NO: 35702 - DNA, 21 bp, synthetic construct
  source 1..21: mol_type = other DNA; mol_type = other DNA
aagggggacttttctacctgg

SEQ ID NO: 35703 - DNA, 21 bp, synthetic construct
  source 1..21: mol_type = other DNA; mol_type = other DNA
cttagaagtgggatgggtccc

SEQ ID NO: 35704 - DNA, 21 bp, synthetic construct
  source 1..21: mol_type = other DNA; mol_type = other DNA
tggtggtcgagcatcaaggag

SEQ ID NO: 35705 - DNA, 21 bp, synthetic construct
  source 1..21: mol_type = other DNA; mol_type = other DNA
ttgtggagtggtgtcggtcca

SEQ ID NO: 35706 - DNA, 21 bp, synthetic construct
  source 1..21: mol_type = other DNA; mol_type = other DNA
cgtagagatggaaccagcgct

SEQ ID NO: 35707 - DNA, 21 bp, synthetic construct
  source 1..21: mol_type = other DNA; mol_type = other DNA
tgggatcccatgtgtaaggca

SEQ ID NO: 35708 - DNA, 21 bp, synthetic construct
  source 1..21: mol_type = other DNA; mol_type = other DNA
cgttcggagttcacagcattt

SEQ ID NO: 35709 - DNA, 21 bp, synthetic construct
  source 1..21: mol_type = other DNA; mol_type = other DNA
atcgatgaatttaggagttgg

SEQ ID NO: 35710 - DNA, 21 bp, synthetic construct
  source 1..21: mol_type = other DNA; mol_type = other DNA
cgggaggaaacatcgagttgg

SEQ ID NO: 35711 - DNA, 21 bp, synthetic construct
  source 1..21: mol_type = other DNA; mol_type = other DNA
cttcatgtacagggcccaaat

SEQ ID NO: 35712 - DNA, 21 bp, synthetic construct
  source 1..21: mol_type = other DNA; mol_type = other DNA
ttatgggatggcacacctaga

SEQ ID NO: 35713 - DNA, 21 bp, synthetic construct
  source 1..21: mol_type = other DNA; mol_type = other DNA
aatatggcgagtgcgggttgg

SEQ ID NO: 35714 - DNA, 21 bp, synthetic construct
  source 1..21: mol_type = other DNA; mol_type = other DNA
tttcctccgttgtttgcagcg

SEQ ID NO: 35715 - DNA, 21 bp, synthetic construct
  source 1..21: mol_type = other DNA; mol_type = other DNA
agacgtgacggaacttcagcc

SEQ ID NO: 35716 - DNA, 21 bp, synthetic construct
  source 1..21: mol_type = other DNA; mol_type = other DNA
gactggaccgggaacgctgct

SEQ ID NO: 35717 - DNA, 21 bp, synthetic construct
  source 1..21: mol_type = other DNA; mol_type = other DNA
ttagccaccggtgatggacct

SEQ ID NO: 35718 - DNA, 21 bp, synthetic construct
  source 1..21: mol_type = other DNA; mol_type = other DNA
tacagccgccacgggacgaat

SEQ ID NO: 35719 - DNA, 21 bp, synthetic construct
  source 1..21: mol_type = other DNA; mol_type = other DNA
ataatggcaacgagtacttgg

SEQ ID NO: 35720 - DNA, 21 bp, synthetic construct
  source 1..21: mol_type = other DNA; mol_type = other DNA
acctacgacgggaccgctgca

SEQ ID NO: 35721 - DNA, 21 bp, synthetic construct
  source 1..21: mol_type = other DNA; mol_type = other DNA
ctttgggatggctccgcgagt

SEQ ID NO: 35722 - DNA, 21 bp, synthetic construct
  source 1..21: mol_type = other DNA; mol_type = other DNA
aaagatgaatacatggtatgg

SEQ ID NO: 35723 - DNA, 21 bp, synthetic construct
  source 1..21: mol_type = other DNA; mol_type = other DNA
acatgggaaggaactccagcg

SEQ ID NO: 35724 - DNA, 21 bp, synthetic construct
  source 1..21: mol_type = other DNA; mol_type = other DNA
atgagagacggcagtaatgcc

SEQ ID NO: 35725 - DNA, 21 bp, synthetic construct
  source 1..21: mol_type = other DNA; mol_type = other DNA
ctaagggatggctccccaccc

SEQ ID NO: 35726 - DNA, 21 bp, synthetic construct
  source 1..21: mol_type = other DNA; mol_type = other DNA
atgacaagcaccaacggagtt

SEQ ID NO: 35727 - DNA, 21 bp, synthetic construct
  source 1..21: mol_type = other DNA; mol_type = other DNA
agagacgaattcaggggctgg

SEQ ID NO: 35728 - DNA, 21 bp, synthetic construct
  source 1..21: mol_type = other DNA; mol_type = other DNA
tacgatgttggtacttggtcg

SEQ ID NO: 35729 - DNA, 21 bp, synthetic construct
  source 1..21: mol_type = other DNA; mol_type = other DNA
agagacgattttcatccgttc

SEQ ID NO: 35730 - DNA, 21 bp, synthetic construct
  source 1..21: mol_type = other DNA; mol_type = other DNA
acgtatgatggcacagcggcg

SEQ ID NO: 35731 - DNA, 21 bp, synthetic construct
  source 1..21: mol_type = other DNA; mol_type = other DNA
acctgggaagggactaatgca

SEQ ID NO: 35732 - DNA, 21 bp, synthetic construct
  source 1..21: mol_type = other DNA; mol_type = other DNA
tatgcccggcacggctacaat

SEQ ID NO: 35733 - DNA, 21 bp, synthetic construct
  source 1..21: mol_type = other DNA; mol_type = other DNA
tacagcaagtggaacccaaac

SEQ ID NO: 35734 - DNA, 21 bp, synthetic construct
  source 1..21: mol_type = other DNA; mol_type = other DNA
gacttcttcggacacgacgcg

SEQ ID NO: 35735 - DNA, 21 bp, synthetic construct
  source 1..21: mol_type = other DNA; mol_type = other DNA
caagatggctactccaggtgg

SEQ ID NO: 35736 - DNA, 21 bp, synthetic construct
  source 1..21: mol_type = other DNA; mol_type = other DNA
tattttactaatcaaataaat

SEQ ID NO: 35737 - DNA, 21 bp, synthetic construct
  source 1..21: mol_type = other DNA; mol_type = other DNA
gacatgggaagcaatacttgg

SEQ ID NO: 35738 - DNA, 21 bp, synthetic construct
  source 1..21: mol_type = other DNA; mol_type = other DNA
acgtggtccggcgaaaacgcg

SEQ ID NO: 35739 - DNA, 21 bp, synthetic construct
  source 1..21: mol_type = other DNA; mol_type = other DNA
aaatttgatggcacatctgca

SEQ ID NO: 35740 - DNA, 21 bp, synthetic construct
  source 1..21: mol_type = other DNA; mol_type = other DNA
ttaatggatggtacgaatgcc

SEQ ID NO: 35741 - DNA, 21 bp, synthetic construct
  source 1..21: mol_type = other DNA; mol_type = other DNA
ataggtggccgctgtccacca

SEQ ID NO: 35742 - DNA, 21 bp, synthetic construct
  source 1..21: mol_type = other DNA; mol_type = other DNA
accgtatggggggatcctgca

SEQ ID NO: 35743 - DNA, 21 bp, synthetic construct
  source 1..21: mol_type = other DNA; mol_type = other DNA
gtctcgggtggcactgctggt

SEQ ID NO: 35744 - DNA, 21 bp, synthetic construct
  source 1..21: mol_type = other DNA; mol_type = other DNA
cgtgctgaagcggtgagatgg

SEQ ID NO: 35745 - DNA, 21 bp, synthetic construct
  source 1..21: mol_type = other DNA; mol_type = other DNA
acatgggatggaatgcaagcg

SEQ ID NO: 35746 - DNA, 21 bp, synthetic construct
  source 1..21: mol_type = other DNA; mol_type = other DNA
aagttcgacggtactagcgcg

SEQ ID NO: 35747 - DNA, 21 bp, synthetic construct
  source 1..21: mol_type = other DNA; mol_type = other DNA
ggagatgagtacattatgtac

SEQ ID NO: 35748 - DNA, 21 bp, synthetic construct
  source 1..21: mol_type = other DNA; mol_type = other DNA
ttatgggacggcactttgcgc

SEQ ID NO: 35749 - DNA, 21 bp, synthetic construct
  source 1..21: mol_type = other DNA; mol_type = other DNA
aaggatggcttctcaatctat

SEQ ID NO: 35750 - DNA, 21 bp, synthetic construct
  source 1..21: mol_type = other DNA; mol_type = other DNA
gacatgcgaagtccgaactgg

SEQ ID NO: 35751 - DNA, 21 bp, synthetic construct
  source 1..21: mol_type = other DNA; mol_type = other DNA
acctggagcggagagaacgct

SEQ ID NO: 35752 - DNA, 21 bp, synthetic construct
  source 1..21: mol_type = other DNA; mol_type = other DNA
cgtgacgaggccagcgcgtgg

SEQ ID NO: 35753 - DNA, 21 bp, synthetic construct
  source 1..21: mol_type = other DNA; mol_type = other DNA
ggaggagaatcatcgatgtgg

SEQ ID NO: 35754 - DNA, 21 bp, synthetic construct
  source 1..21: mol_type = other DNA; mol_type = other DNA
tattttacccgccaggtcaat

SEQ ID NO: 35755 - DNA, 21 bp, synthetic construct
  source 1..21: mol_type = other DNA; mol_type = other DNA
ctctgggacggcacgcctcgc

SEQ ID NO: 35756 - DNA, 21 bp, synthetic construct
  source 1..21: mol_type = other DNA; mol_type = other DNA
actaaatatggcgatcccagc

SEQ ID NO: 35757 - DNA, 21 bp, synthetic construct
  source 1..21: mol_type = other DNA; mol_type = other DNA
ctctgggacgggacgccacgt

SEQ ID NO: 35758 - DNA, 21 bp, synthetic construct
  source 1..21: mol_type = other DNA; mol_type = other DNA
atgcgagatggcactacggct

SEQ ID NO: 35759 - DNA, 21 bp, synthetic construct
  source 1..21: mol_type = other DNA; mol_type = other DNA
ttgaaagacggaactgctagt

SEQ ID NO: 35760 - DNA, 21 bp, synthetic construct
  source 1..21: mol_type = other DNA; mol_type = other DNA
atgagggatggaacggatgcc

SEQ ID NO: 35761 - DNA, 21 bp, synthetic construct
  source 1..21: mol_type = other DNA; mol_type = other DNA
atgagagatggcacaagggcc

SEQ ID NO: 35762 - DNA, 21 bp, synthetic construct
  source 1..21: mol_type = other DNA; mol_type = other DNA
acaaagtacggggacccatcg

SEQ ID NO: 35763 - DNA, 21 bp, synthetic construct
  source 1..21: mol_type = other DNA; mol_type = other DNA
ttatttgatggaacaatacct

SEQ ID NO: 35764 - DNA, 21 bp, synthetic construct
  source 1..21: mol_type = other DNA; mol_type = other DNA
ttgaggaacggaaacccggcg

SEQ ID NO: 35765 - DNA, 21 bp, synthetic construct
  source 1..21: mol_type = other DNA; mol_type = other DNA
gacttgagatcgagtgactgg

SEQ ID NO: 35766 - DNA, 21 bp, synthetic construct
  source 1..21: mol_type = other DNA; mol_type = other DNA
gactacacaggtcgaatagct

SEQ ID NO: 35767 - DNA, 21 bp, synthetic construct
  source 1..21: mol_type = other DNA; mol_type = other DNA
ttgagggacgggacgcgtgct

SEQ ID NO: 35768 - DNA, 21 bp, synthetic construct
  source 1..21: mol_type = other DNA; mol_type = other DNA
actcgattcggggatccaagt

SEQ ID NO: 35769 - DNA, 21 bp, synthetic construct
  source 1..21: mol_type = other DNA; mol_type = other DNA
acgtgggaggggacgcctgct

SEQ ID NO: 35770 - DNA, 21 bp, synthetic construct
  source 1..21: mol_type = other DNA; mol_type = other DNA
ttatgggatggaactgttgcc

SEQ ID NO: 35771 - DNA, 21 bp, synthetic construct
  source 1..21: mol_type = other DNA; mol_type = other DNA
gcgtttgatggaaccagtgcg

SEQ ID NO: 35772 - DNA, 21 bp, synthetic construct
  source 1..21: mol_type = other DNA; mol_type = other DNA
gattttttcgggcatgatgct

SEQ ID NO: 35773 - DNA, 21 bp, synthetic construct
  source 1..21: mol_type = other DNA; mol_type = other DNA
ttatgggatggtacacccagg

SEQ ID NO: 35774 - DNA, 21 bp, synthetic construct
  source 1..21: mol_type = other DNA; mol_type = other DNA
atgcgtgacggaacgcgagct

SEQ ID NO: 35775 - DNA, 21 bp, synthetic construct
  source 1..21: mol_type = other DNA; mol_type = other DNA
ctccgcgatggcaccagggca

SEQ ID NO: 35776 - DNA, 21 bp, synthetic construct
  source 1..21: mol_type = other DNA; mol_type = other DNA
cttatggacggaaccaacgcg

SEQ ID NO: 35777 - DNA, 21 bp, synthetic construct
  source 1..21: mol_type = other DNA; mol_type = other DNA
acatgggacgggacccccgct

SEQ ID NO: 35778 - DNA, 21 bp, synthetic construct
  source 1..21: mol_type = other DNA; mol_type = other DNA
atgtttgacggtagcagtgca

SEQ ID NO: 35779 - DNA, 21 bp, synthetic construct
  source 1..21: mol_type = other DNA; mol_type = other DNA
atgtgggatggcacgcatgca

SEQ ID NO: 35780 - DNA, 21 bp, synthetic construct
  source 1..21: mol_type = other DNA; mol_type = other DNA
ataccacccctgttcgaggtc

SEQ ID NO: 35781 - DNA, 21 bp, synthetic construct
  source 1..21: mol_type = other DNA; mol_type = other DNA
ctctgtaaaccctgcctcaag

SEQ ID NO: 35782 - DNA, 21 bp, synthetic construct
  source 1..21: mol_type = other DNA; mol_type = other DNA
tattttaccggagtcgttgct

SEQ ID NO: 35783 - DNA, 21 bp, synthetic construct
  source 1..21: mol_type = other DNA; mol_type = other DNA
atgagggacggaacaaccgcg

SEQ ID NO: 35784 - DNA, 21 bp, synthetic construct
  source 1..21: mol_type = other DNA; mol_type = other DNA
ctctgtcggccctgttcctac

SEQ ID NO: 35785 - DNA, 21 bp, synthetic construct
  source 1..21: mol_type = other DNA; mol_type = other DNA
ttgttcgacggcaccgtggct

SEQ ID NO: 35786 - DNA, 21 bp, synthetic construct
  source 1..21: mol_type = other DNA; mol_type = other DNA
tgtaaaagccagacttgttgt

SEQ ID NO: 35787 - DNA, 21 bp, synthetic construct
  source 1..21: mol_type = other DNA; mol_type = other DNA
tgtaagcgcgggtggagcgag

SEQ ID NO: 35788 - DNA, 21 bp, synthetic construct
  source 1..21: mol_type = other DNA; mol_type = other DNA
tgcgcgttgtatttacacgaa

SEQ ID NO: 35789 - DNA, 21 bp, synthetic construct
  source 1..21: mol_type = other DNA; mol_type = other DNA
gagaggatgaactgtcattcg

SEQ ID NO: 35790 - DNA, 21 bp, synthetic construct
  source 1..21: mol_type = other DNA; mol_type = other DNA
tatgtcaagtctcaaaagctt

SEQ ID NO: 35791 - DNA, 21 bp, synthetic construct
  source 1..21: mol_type = other DNA; mol_type = other DNA
tgtgcaccctacgagcacgag

SEQ ID NO: 35792 - DNA, 21 bp, synthetic construct
  source 1..21: mol_type = other DNA; mol_type = other DNA
cgcgaagaatatatgccattt

SEQ ID NO: 35793 - DNA, 21 bp, synthetic construct
  source 1..21: mol_type = other DNA; mol_type = other DNA
ctgtgtaaaccttgcttgttt

SEQ ID NO: 35794 - DNA, 21 bp, synthetic construct
  source 1..21: mol_type = other DNA; mol_type = other DNA
tatagttgtaacagcgataat

SEQ ID NO: 35795 - DNA, 21 bp, synthetic construct
  source 1..21: mol_type = other DNA; mol_type = other DNA
tgcgccccggacccacgcgaa

SEQ ID NO: 35796 - DNA, 21 bp, synthetic construct
  source 1..21: mol_type = other DNA; mol_type = other DNA
taccataaattaaatccgttt

SEQ ID NO: 35797 - DNA, 21 bp, synthetic construct
  source 1..21: mol_type = other DNA; mol_type = other DNA
ttatgcaagccatgcctcttc

SEQ ID NO: 35798 - DNA, 21 bp, synthetic construct
  source 1..21: mol_type = other DNA; mol_type = other DNA
atggaatctacgaacggtcgc

SEQ ID NO: 35799 - DNA, 21 bp, synthetic construct
  source 1..21: mol_type = other DNA; mol_type = other DNA
cgcgatgaatattctccctgg

SEQ ID NO: 35800 - DNA, 21 bp, synthetic construct
  source 1..21: mol_type = other DNA; mol_type = other DNA
atatgttcaaaattacagccc

SEQ ID NO: 35801 - DNA, 21 bp, synthetic construct
  source 1..21: mol_type = other DNA; mol_type = other DNA
atttgtgcgagccgattaagc

SEQ ID NO: 35802 - DNA, 21 bp, synthetic construct
  source 1..21: mol_type = other DNA; mol_type = other DNA
gaagacggtagttgtaaagcg

SEQ ID NO: 35803 - DNA, 21 bp, synthetic construct
  source 1..21: mol_type = other DNA; mol_type = other DNA
aaaaacaattgtacctttgga

SEQ ID NO: 35804 - DNA, 21 bp, synthetic construct
  source 1..21: mol_type = other DNA; mol_type = other DNA
aattgtaactttgtcgggaag

SEQ ID NO: 35805 - DNA, 21 bp, synthetic construct
  source 1..21: mol_type = other DNA; mol_type = other DNA
ttttcatgtgtaaccggttcg

SEQ ID NO: 35806 - DNA, 21 bp, synthetic construct
  source 1..21: mol_type = other DNA; mol_type = other DNA
ctctgtaagcctcatcttaca

SEQ ID NO: 35807 - DNA, 21 bp, synthetic construct
  source 1..21: mol_type = other DNA; mol_type = other DNA
tgtgcgccacagttgcacgag

SEQ ID NO: 35808 - DNA, 21 bp, synthetic construct
  source 1..21: mol_type = other DNA; mol_type = other DNA
tgtaagaggggggcgatgtca

SEQ ID NO: 35809 - DNA, 21 bp, synthetic construct
  source 1..21: mol_type = other DNA; mol_type = other DNA
agaacatacgattgcatagga

SEQ ID NO: 35810 - DNA, 21 bp, synthetic construct
  source 1..21: mol_type = other DNA; mol_type = other DNA
ttgcaccggttacttcctaat

SEQ ID NO: 35811 - DNA, 21 bp, synthetic construct
  source 1..21: mol_type = other DNA; mol_type = other DNA
tatcatcgcctggaccctgat

SEQ ID NO: 35812 - DNA, 21 bp, synthetic construct
  source 1..21: mol_type = other DNA; mol_type = other DNA
aaatttgataattgcggatcc

SEQ ID NO: 35813 - DNA, 21 bp, synthetic construct
  source 1..21: mol_type = other DNA; mol_type = other DNA
cgaaactgtgaagtcggaccc

SEQ ID NO: 35814 - DNA, 21 bp, synthetic construct
  source 1..21: mol_type = other DNA; mol_type = other DNA
ctctgcaaaggctgccttact

SEQ ID NO: 35815 - DNA, 21 bp, synthetic construct
  source 1..21: mol_type = other DNA; mol_type = other DNA
ttatgtagaccttgctcactg

SEQ ID NO: 35816 - DNA, 21 bp, synthetic construct
  source 1..21: mol_type = other DNA; mol_type = other DNA
aagttttgtaacaccggaagc

SEQ ID NO: 35817 - DNA, 21 bp, synthetic construct
  source 1..21: mol_type = other DNA; mol_type = other DNA
tgggcgccgatgtgcaaagca

SEQ ID NO: 35818 - DNA, 21 bp, synthetic construct
  source 1..21: mol_type = other DNA; mol_type = other DNA
ctctgccgaccctgcagtcac

SEQ ID NO: 35819 - DNA, 21 bp, synthetic construct
  source 1..21: mol_type = other DNA; mol_type = other DNA
tgtatgccgggcgtaccgtta

SEQ ID NO: 35820 - DNA, 21 bp, synthetic construct
  source 1..21: mol_type = other DNA; mol_type = other DNA
aaagacgactacacaactttt

SEQ ID NO: 35821 - DNA, 21 bp, synthetic construct
  source 1..21: mol_type = other DNA; mol_type = other DNA
tacttctccggcaggttgttg

SEQ ID NO: 35822 - DNA, 21 bp, synthetic construct
  source 1..21: mol_type = other DNA; mol_type = other DNA
ggtcgtcctaattgcaaacca

SEQ ID NO: 35823 - DNA, 21 bp, synthetic construct
  source 1..21: mol_type = other DNA; mol_type = other DNA
tgcaccacgaaaacgggacac

SEQ ID NO: 35824 - DNA, 21 bp, synthetic construct
  source 1..21: mol_type = other DNA; mol_type = other DNA
tacagtcgtgtgaaccctaac

SEQ ID NO: 35825 - DNA, 21 bp, synthetic construct
  source 1..21: mol_type = other DNA; mol_type = other DNA
tgcaaaggttccgcagagcaa

SEQ ID NO: 35826 - DNA, 21 bp, synthetic construct
  source 1..21: mol_type = other DNA; mol_type = other DNA
ccgatggaaagccttaagtgg

SEQ ID NO: 35827 - DNA, 21 bp, synthetic construct
  source 1..21: mol_type = other DNA; mol_type = other DNA
aagcacgactttacttgtgct

SEQ ID NO: 35828 - DNA, 21 bp, synthetic construct
  source 1..21: mol_type = other DNA; mol_type = other DNA
ctttgcgtaccatgtttaacg

SEQ ID NO: 35829 - DNA, 21 bp, synthetic construct
  source 1..21: mol_type = other DNA; mol_type = other DNA
ggaggtggtactaaatgcgga

SEQ ID NO: 35830 - DNA, 21 bp, synthetic construct
  source 1..21: mol_type = other DNA; mol_type = other DNA
agggagtgtaccagtccttgg

SEQ ID NO: 35831 - DNA, 21 bp, synthetic construct
  source 1..21: mol_type = other DNA; mol_type = other DNA
ctccacaggctaaatccggat

SEQ ID NO: 35832 - DNA, 21 bp, synthetic construct
  source 1..21: mol_type = other DNA; mol_type = other DNA
aagtgtaaaccatgtccaatt

SEQ ID NO: 35833 - DNA, 21 bp, synthetic construct
  source 1..21: mol_type = other DNA; mol_type = other DNA
tattggagtggcgttgtgatt

SEQ ID NO: 35834 - DNA, 21 bp, synthetic construct
  source 1..21: mol_type = other DNA; mol_type = other DNA
tgcaggatggctccaccgtat

SEQ ID NO: 35835 - DNA, 21 bp, synthetic construct
  source 1..21: mol_type = other DNA; mol_type = other DNA
ttgtgtaaaccctgtcttcgt

SEQ ID NO: 35836 - DNA, 21 bp, synthetic construct
  source 1..21: mol_type = other DNA; mol_type = other DNA
tggaaaatgggatgcgccgat

SEQ ID NO: 35837 - DNA, 21 bp, synthetic construct
  source 1..21: mol_type = other DNA; mol_type = other DNA
tgcggaagaagttgctgtcca

SEQ ID NO: 35838 - DNA, 21 bp, synthetic construct
  source 1..21: mol_type = other DNA; mol_type = other DNA
tgtaagggaagctatgagcaa

SEQ ID NO: 35839 - DNA, 21 bp, synthetic construct
  source 1..21: mol_type = other DNA; mol_type = other DNA
ttcgcgaagtgcaacgcaaat

SEQ ID NO: 35840 - DNA, 21 bp, synthetic construct
  source 1..21: mol_type = other DNA; mol_type = other DNA
cgtgacgagtttacaccttgg

SEQ ID NO: 35841 - DNA, 21 bp, synthetic construct
  source 1..21: mol_type = other DNA; mol_type = other DNA
ttcgccaagtgcaactataac

SEQ ID NO: 35842 - DNA, 21 bp, synthetic construct
  source 1..21: mol_type = other DNA; mol_type = other DNA
gatcacggtaaatgcggtaga

SEQ ID NO: 35843 - DNA, 21 bp, synthetic construct
  source 1..21: mol_type = other DNA; mol_type = other DNA
ttcagccgattgggatacaac

SEQ ID NO: 35844 - DNA, 21 bp, synthetic construct
  source 1..21: mol_type = other DNA; mol_type = other DNA
tgcaatccttacctgcatgaa

SEQ ID NO: 35845 - DNA, 21 bp, synthetic construct
  source 1..21: mol_type = other DNA; mol_type = other DNA
cgctcagaatttgccacctgg

SEQ ID NO: 35846 - DNA, 21 bp, synthetic construct
  source 1..21: mol_type = other DNA; mol_type = other DNA
gtgaatgactacaccatattt

SEQ ID NO: 35847 - DNA, 21 bp, synthetic construct
  source 1..21: mol_type = other DNA; mol_type = other DNA
ttaaaactttgtgctcataac

SEQ ID NO: 35848 - DNA, 21 bp, synthetic construct
  source 1..21: mol_type = other DNA; mol_type = other DNA
acacaaatcgcatgcgaccgg

SEQ ID NO: 35849 - DNA, 21 bp, synthetic construct
  source 1..21: mol_type = other DNA; mol_type = other DNA
cgttgcgggataccgacggcc

SEQ ID NO: 35850 - DNA, 21 bp, synthetic construct
  source 1..21: mol_type = other DNA; mol_type = other DNA
gggggaggtccatgttgtaga

SEQ ID NO: 35851 - DNA, 21 bp, synthetic construct
  source 1..21: mol_type = other DNA; mol_type = other DNA
tggactccccactgtaaggcg

SEQ ID NO: 35852 - DNA, 21 bp, synthetic construct
  source 1..21: mol_type = other DNA; mol_type = other DNA
tacggttgtcagtccgggttt

SEQ ID NO: 35853 - DNA, 21 bp, synthetic construct
  source 1..21: mol_type = other DNA; mol_type = other DNA
aaagatgaatacacaatgtac

SEQ ID NO: 35854 - DNA, 21 bp, synthetic construct
  source 1..21: mol_type = other DNA; mol_type = other DNA
tggaccccaatgtgtaagacc

SEQ ID NO: 35855 - DNA, 21 bp, synthetic construct
  source 1..21: mol_type = other DNA; mol_type = other DNA
tatttcgaaggtgtaagatgg

SEQ ID NO: 35856 - DNA, 21 bp, synthetic construct
  source 1..21: mol_type = other DNA; mol_type = other DNA
tatgagccagggtgcagtgag

SEQ ID NO: 35857 - DNA, 21 bp, synthetic construct
  source 1..21: mol_type = other DNA; mol_type = other DNA
tatttcaccggagcctgcgac

SEQ ID NO: 35858 - DNA, 21 bp, synthetic construct
  source 1..21: mol_type = other DNA; mol_type = other DNA
ctattggcaagcgccacctgg

SEQ ID NO: 35859 - DNA, 21 bp, synthetic construct
  source 1..21: mol_type = other DNA; mol_type = other DNA
ttttcccgcattggttataac

SEQ ID NO: 35860 - DNA, 21 bp, synthetic construct
  source 1..21: mol_type = other DNA; mol_type = other DNA
tactcacgcatacagtttgac

SEQ ID NO: 35861 - DNA, 21 bp, synthetic construct
  source 1..21: mol_type = other DNA; mol_type = other DNA
tccagtctttgtctgcgggaa

SEQ ID NO: 35862 - DNA, 21 bp, synthetic construct
  source 1..21: mol_type = other DNA; mol_type = other DNA
atagacgagtggttacccttc

SEQ ID NO: 35863 - DNA, 21 bp, synthetic construct
  source 1..21: mol_type = other DNA; mol_type = other DNA
ttctgctccacgaatggcgtc

SEQ ID NO: 35864 - DNA, 21 bp, synthetic construct
  source 1..21: mol_type = other DNA; mol_type = other DNA
tactttacgggaatgtgtgaa

SEQ ID NO: 35865 - DNA, 21 bp, synthetic construct
  source 1..21: mol_type = other DNA; mol_type = other DNA
ctccatagactctcaccttac

SEQ ID NO: 35866 - DNA, 21 bp, synthetic construct
  source 1..21: mol_type = other DNA; mol_type = other DNA
aaggatgactacactgtgttc

SEQ ID NO: 35867 - DNA, 21 bp, synthetic construct
  source 1..21: mol_type = other DNA; mol_type = other DNA
cgttgccctgactgtcaccta

SEQ ID NO: 35868 - DNA, 21 bp, synthetic construct
  source 1..21: mol_type = other DNA; mol_type = other DNA
agggatgaattttgcaccagg

SEQ ID NO: 35869 - DNA, 21 bp, synthetic construct
  source 1..21: mol_type = other DNA; mol_type = other DNA
tgtaagcctagtcctttattt

SEQ ID NO: 35870 - DNA, 21 bp, synthetic construct
  source 1..21: mol_type = other DNA; mol_type = other DNA
tgtttgccgaagtgttgtgag

SEQ ID NO: 35871 - DNA, 21 bp, synthetic construct
  source 1..21: mol_type = other DNA; mol_type = other DNA
tactcgaggataggtaaaaac

SEQ ID NO: 35872 - DNA, 21 bp, synthetic construct
  source 1..21: mol_type = other DNA; mol_type = other DNA
tactggacaggatgtagggaa

SEQ ID NO: 35873 - DNA, 21 bp, synthetic construct
  source 1..21: mol_type = other DNA; mol_type = other DNA
tatttcgctggagtttgtcct

SEQ ID NO: 35874 - DNA, 21 bp, synthetic construct
  source 1..21: mol_type = other DNA; mol_type = other DNA
tgcgcaccgtcgcttcatgag

SEQ ID NO: 35875 - DNA, 21 bp, synthetic construct
  source 1..21: mol_type = other DNA; mol_type = other DNA
tgcaagccattgtgttgtgag

SEQ ID NO: 35876 - DNA, 21 bp, synthetic construct
  source 1..21: mol_type = other DNA; mol_type = other DNA
agggatgaattcacatcgttc

SEQ ID NO: 35877 - DNA, 21 bp, synthetic construct
  source 1..21: mol_type = other DNA; mol_type = other DNA
atgacaggtgacagctgctta

SEQ ID NO: 35878 - DNA, 21 bp, synthetic construct
  source 1..21: mol_type = other DNA; mol_type = other DNA
ggtagcgagtttgttaggtgg

SEQ ID NO: 35879 - DNA, 21 bp, synthetic construct
  source 1..21: mol_type = other DNA; mol_type = other DNA
tgtggaactaagtgctgtcct

SEQ ID NO: 35880 - DNA, 21 bp, synthetic construct
  source 1..21: mol_type = other DNA; mol_type = other DNA
tatttcacagggaaatgtgtg

SEQ ID NO: 35881 - DNA, 21 bp, synthetic construct
  source 1..21: mol_type = other DNA; mol_type = other DNA
gtgtggagcaccaacggaagg

SEQ ID NO: 35882 - DNA, 21 bp, synthetic construct
  source 1..21: mol_type = other DNA; mol_type = other DNA
tacgtaaaaagccagaaatta

SEQ ID NO: 35883 - DNA, 21 bp, synthetic construct
  source 1..21: mol_type = other DNA; mol_type = other DNA
tacgagccaatctgtaaggaa

SEQ ID NO: 35884 - DNA, 21 bp, synthetic construct
  source 1..21: mol_type = other DNA; mol_type = other DNA
tcaatctgcgcgaatggtgaa

SEQ ID NO: 35885 - DNA, 21 bp, synthetic construct
  source 1..21: mol_type = other DNA; mol_type = other DNA
ctatgcaggccatgtagttta

SEQ ID NO: 35886 - DNA, 21 bp, synthetic construct
  source 1..21: mol_type = other DNA; mol_type = other DNA
tggtttagtggggttaggatc

SEQ ID NO: 35887 - DNA, 21 bp, synthetic construct
  source 1..21: mol_type = other DNA; mol_type = other DNA
tgcggcagcattcgtccgact

SEQ ID NO: 35888 - DNA, 21 bp, synthetic construct
  source 1..21: mol_type = other DNA; mol_type = other DNA
tgctccggccctccaaaagaa

SEQ ID NO: 35889 - DNA, 21 bp, synthetic construct
  source 1..21: mol_type = other DNA; mol_type = other DNA
ttgtgtaaaccctgtttgtat

SEQ ID NO: 35890 - DNA, 21 bp, synthetic construct
  source 1..21: mol_type = other DNA; mol_type = other DNA
agagatgattggtctacatgg

SEQ ID NO: 35891 - DNA, 21 bp, synthetic construct
  source 1..21: mol_type = other DNA; mol_type = other DNA
ggatgtcgcccatgccctggg

SEQ ID NO: 35892 - DNA, 21 bp, synthetic construct
  source 1..21: mol_type = other DNA; mol_type = other DNA
ggatgcagaccccaggcagga

SEQ ID NO: 35893 - DNA, 21 bp, synthetic construct
  source 1..21: mol_type = other DNA; mol_type = other DNA
tgcacaagcaagacgggttgg

SEQ ID NO: 35894 - DNA, 21 bp, synthetic construct
  source 1..21: mol_type = other DNA; mol_type = other DNA
caggatggttcatgtaaggcg

SEQ ID NO: 35895 - DNA, 21 bp, synthetic construct
  source 1..21: mol_type = other DNA; mol_type = other DNA
tatttcactggtagatgggac

SEQ ID NO: 35896 - DNA, 21 bp, synthetic construct
  source 1..21: mol_type = other DNA; mol_type = other DNA
tgtaagccgccccccctcgcc

SEQ ID NO: 35897 - DNA, 21 bp, synthetic construct
  source 1..21: mol_type = other DNA; mol_type = other DNA
cgaatggaaagtagtgtctgg

SEQ ID NO: 35898 - DNA, 21 bp, synthetic construct
  source 1..21: mol_type = other DNA; mol_type = other DNA
tgtgggggcttgagtcgtggt

SEQ ID NO: 35899 - DNA, 21 bp, synthetic construct
  source 1..21: mol_type = other DNA; mol_type = other DNA
tgccgtacaagcgaatgttgc

SEQ ID NO: 35900 - DNA, 21 bp, synthetic construct
  source 1..21: mol_type = other DNA; mol_type = other DNA
aaaagtgattacatgtctttt

SEQ ID NO: 35901 - DNA, 21 bp, synthetic construct
  source 1..21: mol_type = other DNA
gaagacaaatgccggcagttc

SEQ ID NO: 35902 - DNA, 21 bp, synthetic construct
  source 1..21: mol_type = other DNA
ttatgtaaacccgaattgacc

SEQ ID NO: 35903 - DNA, 21 bp, synthetic construct
  source 1..21: mol_type = other DNA
ggcggtgaatttagtaggtgg

SEQ ID NO: 35904 - DNA, 21 bp, synthetic construct
  source 1..21: mol_type = other DNA; mol_type = other DNA
tattgccggttgtctgacaac

SEQ ID NO: 35905 - DNA, 21 bp, synthetic construct
  source 1..21: mol_type = other DNA; mol_type = other DNA
ggaggagagtatgttacctgg

SEQ ID NO: 35906 - DNA, 21 bp, synthetic construct
  source 1..21: mol_type = other DNA; mol_type = other DNA
tgcacgtcacccaccggccac

SEQ ID NO: 35907 - DNA, 21 bp, synthetic construct
  source 1..21: mol_type = other DNA; mol_type = other DNA
tgcgggagcaagaccggtcac

SEQ ID NO: 35908 - DNA, 21 bp, synthetic construct
  source 1..21: mol_type = other DNA; mol_type = other DNA
ggtggctcgccatgcaggcca

SEQ ID NO: 35909 - DNA, 21 bp, synthetic construct
  source 1..21: mol_type = other DNA; mol_type = other DNA
gggggggcaagtagtcgttgg

SEQ ID NO: 35910 - DNA, 21 bp, synthetic construct
  source 1..21: mol_type = other DNA; mol_type = other DNA
tggtggagtgctattagagag

SEQ ID NO: 35911 - DNA, 21 bp, synthetic construct
  source 1..21: mol_type = other DNA; mol_type = other DNA
ctatgccgtccatgtagcgtg

SEQ ID NO: 35912 - DNA, 21 bp, synthetic construct
  source 1..21: mol_type = other DNA; mol_type = other DNA
ggcggaagcccgtgtcgaccg

SEQ ID NO: 35913 - DNA, 21 bp, synthetic construct
  source 1..21: mol_type = other DNA; mol_type = other DNA
gacatgcttagttcgtcttgg

SEQ ID NO: 35914 - DNA, 21 bp, synthetic construct
  source 1..21: mol_type = other DNA; mol_type = other DNA
ggaagcggcatgtcattatgg

SEQ ID NO: 35915 - DNA, 21 bp, synthetic construct
  source 1..21: mol_type = other DNA; mol_type = other DNA
tatgaacaaggttgtaaggag

SEQ ID NO: 35916 - DNA, 21 bp, synthetic construct
  source 1..21: mol_type = other DNA; mol_type = other DNA
tgcgggggcggtaggccatgg

SEQ ID NO: 35917 - DNA, 21 bp, synthetic construct
  source 1..21: mol_type = other DNA; mol_type = other DNA
tactttacaggaatggttgat

SEQ ID NO: 35918 - DNA, 21 bp, synthetic construct
  source 1..21: mol_type = other DNA; mol_type = other DNA
gtgccggggcactgccttgtc

SEQ ID NO: 35919 - DNA, 21 bp, synthetic construct
  source 1..21: mol_type = other DNA; mol_type = other DNA
gaaatggaatcgtttaattgg

SEQ ID NO: 35920 - DNA, 21 bp, synthetic construct
  source 1..21: mol_type = other DNA; mol_type = other DNA
tgcgctcctcacttgcatgaa

SEQ ID NO: 35921 - DNA, 21 bp, synthetic construct
  source 1..21: mol_type = other DNA; mol_type = other DNA
ttggcaaaaacagggaccaat

SEQ ID NO: 35922 - DNA, 21 bp, synthetic construct
  source 1..21: mol_type = other DNA; mol_type = other DNA
tatttaaaaagccagttttac

SEQ ID NO: 35923 - DNA, 21 bp, synthetic construct
  source 1..21: mol_type = other DNA; mol_type = other DNA
tgcggtaagataaaaccaggt

SEQ ID NO: 35924 - DNA, 21 bp, synthetic construct
  source 1..21: mol_type = other DNA; mol_type = other DNA
agggacgaatttgtatactac

SEQ ID NO: 35925 - DNA, 21 bp, synthetic construct
  source 1..21: mol_type = other DNA; mol_type = other DNA
cgggacgaatttgtcatatac

SEQ ID NO: 35926 - DNA, 21 bp, synthetic construct
  source 1..21: mol_type = other DNA; mol_type = other DNA
ggttgtaggtcaggggacata

SEQ ID NO: 35927 - DNA, 21 bp, synthetic construct
  source 1..21: mol_type = other DNA; mol_type = other DNA
ttcggcgaatttaaatgcgaa

SEQ ID NO: 35928 - DNA, 21 bp, synthetic construct
  source 1..21: mol_type = other DNA; mol_type = other DNA
tatagtaagcgcaacgtcaac

SEQ ID NO: 35929 - DNA, 21 bp, synthetic construct
  source 1..21: mol_type = other DNA; mol_type = other DNA
tgctcgaaattaaaaccgggt

SEQ ID NO: 35930 - DNA, 21 bp, synthetic construct
  source 1..21: mol_type = other DNA; mol_type = other DNA
tgtaatgacccgatgacggct

SEQ ID NO: 35931 - DNA, 21 bp, synthetic construct
  source 1..21: mol_type = other DNA; mol_type = other DNA
cgcgatgagttcgtgtattat

SEQ ID NO: 35932 - DNA, 21 bp, synthetic construct
  source 1..21: mol_type = other DNA; mol_type = other DNA
aagcacgattttacctgctca

SEQ ID NO: 35933 - DNA, 21 bp, synthetic construct
  source 1..21: mol_type = other DNA; mol_type = other DNA
tctgattggacggatcgatgt

SEQ ID NO: 35934 - DNA, 21 bp, synthetic construct
  source 1..21: mol_type = other DNA; mol_type = other DNA
tgccaagcgaaattagaagtt

SEQ ID NO: 35935 - DNA, 21 bp, synthetic construct
  source 1..21: mol_type = other DNA; mol_type = other DNA
tgtgctccttacggacacgaa

SEQ ID NO: 35936 - DNA, 21 bp, synthetic construct
  source 1..21: mol_type = other DNA; mol_type = other DNA
ggtgtagagacaaggtgtccc

SEQ ID NO: 35937 - DNA, 21 bp, synthetic construct
  source 1..21: mol_type = other DNA; mol_type = other DNA
tattcgtacataggacccaat

SEQ ID NO: 35938 - DNA, 21 bp, synthetic construct
  source 1..21: mol_type = other DNA; mol_type = other DNA
tcgtgtatgaatgttgcaccc

SEQ ID NO: 35939 - DNA, 21 bp, synthetic construct
  source 1..21: mol_type = other DNA; mol_type = other DNA
atgacagggaccagatgctta

SEQ ID NO: 35940 - DNA, 21 bp, synthetic construct
  source 1..21: mol_type = other DNA; mol_type = other DNA
cattgtggcaaatgcctgaat

SEQ ID NO: 35941 - DNA, 21 bp, synthetic construct
  source 1..21: mol_type = other DNA; mol_type = other DNA
gggtgtaggcacggtcagatc

SEQ ID NO: 35942 - DNA, 21 bp, synthetic construct
  source 1..21: mol_type = other DNA; mol_type = other DNA
tacgagcctggttgcttcgaa

SEQ ID NO: 35943 - DNA, 21 bp, synthetic construct
  source 1..21: mol_type = other DNA; mol_type = other DNA
ctttttacgggattcggacca

SEQ ID NO: 35944 - DNA, 21 bp, synthetic construct
  source 1..21: mol_type = other DNA; mol_type = other DNA
tgtaaacctctttgcccaggt

SEQ ID NO: 35945 - DNA, 21 bp, synthetic construct
  source 1..21: mol_type = other DNA; mol_type = other DNA
taccttaagtcccagtattac

SEQ ID NO: 35946 - DNA, 21 bp, synthetic construct
  source 1..21: mol_type = other DNA; mol_type = other DNA
tgtgcggcatatctacatgaa

SEQ ID NO: 35947 - DNA, 21 bp, synthetic construct
  source 1..21: mol_type = other DNA; mol_type = other DNA
agtaagggatcatgcgagcaa

SEQ ID NO: 35948 - DNA, 21 bp, synthetic construct
  source 1..21: mol_type = other DNA; mol_type = other DNA
gtctgccggccttgccctatt

SEQ ID NO: 35949 - DNA, 21 bp, synthetic construct
  source 1..21: mol_type = other DNA; mol_type = other DNA
tgtttcaagccgatgactgct

SEQ ID NO: 35950 - DNA, 21 bp, synthetic construct
  source 1..21: mol_type = other DNA; mol_type = other DNA
tcgccggaaaccaggtgtcct

SEQ ID NO: 35951 - DNA, 21 bp, synthetic construct
  source 1..21: mol_type = other DNA; mol_type = other DNA
tacgctagatttggcccaaat

SEQ ID NO: 35952 - DNA, 21 bp, synthetic construct
  source 1..21: mol_type = other DNA; mol_type = other DNA
taccaccgcttgtccatacac

SEQ ID NO: 35953 - DNA, 21 bp, synthetic construct
  source 1..21: mol_type = other DNA; mol_type = other DNA
tgtaccgacaagaccggccac

SEQ ID NO: 35954 - DNA, 21 bp, synthetic construct
  source 1..21: mol_type = other DNA; mol_type = other DNA
ggcgatgagtgcgtgaaggcg

SEQ ID NO: 35955 - DNA, 21 bp, synthetic construct
  source 1..21: mol_type = other DNA; mol_type = other DNA
tgcacaagcaaaatgggacat

SEQ ID NO: 35956 - DNA, 21 bp, synthetic construct
  source 1..21: mol_type = other DNA; mol_type = other DNA
tatagtcggtggaacttgaac

SEQ ID NO: 35957 - DNA, 21 bp, synthetic construct
  source 1..21: mol_type = other DNA; mol_type = other DNA
aagtgtgataacactggaagc

SEQ ID NO: 35958 - DNA, 21 bp, synthetic construct
  source 1..21: mol_type = other DNA; mol_type = other DNA
gaatgggaagcttgtcctagg

SEQ ID NO: 35959 - DNA, 21 bp, synthetic construct
  source 1..21: mol_type = other DNA; mol_type = other DNA
tcgatgagctcagcaatgtgg

SEQ ID NO: 35960 - DNA, 21 bp, synthetic construct
  source 1..21: mol_type = other DNA; mol_type = other DNA
gatctcgagagttacaaatgg

SEQ ID NO: 35961 - DNA, 21 bp, synthetic construct
  source 1..21: mol_type = other DNA; mol_type = other DNA
atatgcgataagcgggaccca

SEQ ID NO: 35962 - DNA, 21 bp, synthetic construct
  source 1..21: mol_type = other DNA; mol_type = other DNA
ttccatagaaagagtcccgat

SEQ ID NO: 35963 - DNA, 21 bp, synthetic construct
  source 1..21: mol_type = other DNA; mol_type = other DNA
aaaaatgaccatgttaggtgg

SEQ ID NO: 35964 - DNA, 21 bp, synthetic construct
  source 1..21: mol_type = other DNA; mol_type = other DNA
tgtcggggggaacaaaaaatg

SEQ ID NO: 35965 - DNA, 21 bp, synthetic construct
  source 1..21: mol_type = other DNA; mol_type = other DNA
cgttcagagtatactaccttc

SEQ ID NO: 35966 - DNA, 21 bp, synthetic construct
  source 1..21: mol_type = other DNA; mol_type = other DNA
agggacgaattcgtaacctat

SEQ ID NO: 35967 - DNA, 21 bp, synthetic construct
  source 1..21: mol_type = other DNA; mol_type = other DNA
ggggtaggaaccaaatgtgga

SEQ ID NO: 35968 - DNA, 21 bp, synthetic construct
  source 1..21: mol_type = other DNA; mol_type = other DNA
cccatggaatcacagaagtgg

SEQ ID NO: 35969 - DNA, 21 bp, synthetic construct
  source 1..21: mol_type = other DNA; mol_type = other DNA
ttatgcagaccatgttcaatg

SEQ ID NO: 35970 - DNA, 21 bp, synthetic construct
  source 1..21: mol_type = other DNA; mol_type = other DNA
cagctgcctggtaattgcgga

SEQ ID NO: 35971 - DNA, 21 bp, synthetic construct
  source 1..21: mol_type = other DNA; mol_type = other DNA
ggcggagaatttgtccattgg

SEQ ID NO: 35972 - DNA, 21 bp, synthetic construct
  source 1..21: mol_type = other DNA; mol_type = other DNA
agggacccttgtacagttgat

SEQ ID NO: 35973 - DNA, 21 bp, synthetic construct
  source 1..21: mol_type = other DNA; mol_type = other DNA
agggacgaatactcctcttat

SEQ ID NO: 35974 - DNA, 21 bp, synthetic construct
  source 1..21: mol_type = other DNA; mol_type = other DNA
gggtcaggaatgagtctctgg

SEQ ID NO: 35975 - DNA, 21 bp, synthetic construct
  source 1..21: mol_type = other DNA; mol_type = other DNA
cgagatgagtattcaagttac

SEQ ID NO: 35976 - DNA, 21 bp, synthetic construct
  source 1..21: mol_type = other DNA; mol_type = other DNA
atgatgggtacttcctgctta

SEQ ID NO: 35977 - DNA, 21 bp, synthetic construct
  source 1..21: mol_type = other DNA; mol_type = other DNA
tacttcgcggggcgtccggac

SEQ ID NO: 35978 - DNA, 21 bp, synthetic construct
  source 1..21: mol_type = other DNA; mol_type = other DNA
ggccccataaattgcaaatca

SEQ ID NO: 35979 - DNA, 21 bp, synthetic construct
  source 1..21: mol_type = other DNA; mol_type = other DNA
gtttcgacacattgtgacgcg

SEQ ID NO: 35980 - DNA, 21 bp, synthetic construct
  source 1..21: mol_type = other DNA; mol_type = other DNA
aagtctgactacatggtctat

SEQ ID NO: 35981 - DNA, 21 bp, synthetic construct
  source 1..21: mol_type = other DNA; mol_type = other DNA
gtcccagagtgccgtcctaac

SEQ ID NO: 35982 - DNA, 21 bp, synthetic construct
  source 1..21: mol_type = other DNA; mol_type = other DNA
agaacggccctggtctttccg

SEQ ID NO: 35983 - DNA, 21 bp, synthetic construct
  source 1..21: mol_type = other DNA; mol_type = other DNA
tatagccgctatggtatgaac

SEQ ID NO: 35984 - DNA, 21 bp, synthetic construct
  source 1..21: mol_type = other DNA; mol_type = other DNA
ttatggaggactgggatcaac

SEQ ID NO: 35985 - DNA, 21 bp, synthetic construct
  source 1..21: mol_type = other DNA; mol_type = other DNA
atcgatgaatggctcccattt

SEQ ID NO: 35986 - DNA, 21 bp, synthetic construct
  source 1..21: mol_type = other DNA; mol_type = other DNA
gggggcccgcactgctgcggc

SEQ ID NO: 35987 - DNA, 21 bp, synthetic construct
  source 1..21: mol_type = other DNA; mol_type = other DNA
ggttcagattttagcaggtgg

SEQ ID NO: 35988 - DNA, 21 bp, synthetic construct
  source 1..21: mol_type = other DNA; mol_type = other DNA
gctatggagtcgagtaactgg

SEQ ID NO: 35989 - DNA, 21 bp, synthetic construct
  source 1..21: mol_type = other DNA; mol_type = other DNA
cgcgatgatttcgttgccttc

SEQ ID NO: 35990 - DNA, 21 bp, synthetic construct
  source 1..21: mol_type = other DNA; mol_type = other DNA
agcctctgtaaaaccacgtca

SEQ ID NO: 35991 - DNA, 21 bp, synthetic construct
  source 1..21: mol_type = other DNA; mol_type = other DNA
ggcatggaattttgtcggcca

SEQ ID NO: 35992 - DNA, 21 bp, synthetic construct
  source 1..21: mol_type = other DNA; mol_type = other DNA
ttcgaggggaccaactgccgc

SEQ ID NO: 35993 - DNA, 21 bp, synthetic construct
  source 1..21: mol_type = other DNA; mol_type = other DNA
ttcgcgcgtgcatgtcaaaac

SEQ ID NO: 35994 - DNA, 21 bp, synthetic construct
  source 1..21: mol_type = other DNA; mol_type = other DNA
gtttcatcgacttgcacggcc

SEQ ID NO: 35995 - DNA, 21 bp, synthetic construct
  source 1..21: mol_type = other DNA; mol_type = other DNA
ttgtgtcgacctgcgtccgaa

SEQ ID NO: 35996 - DNA, 21 bp, synthetic construct
  source 1..21: mol_type = other DNA; mol_type = other DNA
tacagtcgccacgggcctaac

SEQ ID NO: 35997 - DNA, 21 bp, synthetic construct
  source 1..21: mol_type = other DNA; mol_type = other DNA
ttttggagtggcatccatagt

SEQ ID NO: 35998 - DNA, 21 bp, synthetic construct
  source 1..21: mol_type = other DNA; mol_type = other DNA
ttacaccggttaagcccatat

SEQ ID NO: 35999 - DNA, 21 bp, synthetic construct
  source 1..21: mol_type = other DNA; mol_type = other DNA
ttcgcgaagtgttccgtggtg

SEQ ID NO: 36000 - DNA, 21 bp, synthetic construct
  source 1..21: mol_type = other DNA; mol_type = other DNA
ctgttgtcaagccacgattgg

SEQ ID NO: 36001 - DNA, 21 bp, synthetic construct
  source 1..21: mol_type = other DNA; mol_type = other DNA
cgcagcgaattcatggtctat

SEQ ID NO: 36002 - DNA, 21 bp, synthetic construct
  source 1..21: mol_type = other DNA; mol_type = other DNA
tgcaagccccagatgggcact

SEQ ID NO: 36003 - DNA, 21 bp, synthetic construct
  source 1..21: mol_type = other DNA; mol_type = other DNA
ggttcggggacgagtaggtgg

SEQ ID NO: 36004 - DNA, 21 bp, synthetic construct
  source 1..21: mol_type = other DNA; mol_type = other DNA
cgaggggaatttacagcgtat

SEQ ID NO: 36005 - DNA, 21 bp, synthetic construct
  source 1..21: mol_type = other DNA; mol_type = other DNA
gcctgcaaaccacaaatgggg

SEQ ID NO: 36006 - DNA, 21 bp, synthetic construct
  source 1..21: mol_type = other DNA; mol_type = other DNA
agggagagcacgaatggacgc

SEQ ID NO: 36007 - DNA, 21 bp, synthetic construct
  source 1..21: mol_type = other DNA; mol_type = other DNA
atgacgggaacgtcgtgtact

SEQ ID NO: 36008 - DNA, 21 bp, synthetic construct
  source 1..21: mol_type = other DNA; mol_type = other DNA
tatgtccgttcatgtccaatg

SEQ ID NO: 36009 - DNA, 21 bp, synthetic construct
  source 1..21: mol_type = other DNA; mol_type = other DNA
tgtgagtttggccccatgcct

SEQ ID NO: 36010 - DNA, 21 bp, synthetic construct
  source 1..21: mol_type = other DNA; mol_type = other DNA
atgacgggtaacagttgtctc

SEQ ID NO: 36011 - DNA, 21 bp, synthetic construct
  source 1..21: mol_type = other DNA; mol_type = other DNA
tgcaaacccaatcccagcgtg

SEQ ID NO: 36012 - DNA, 21 bp, synthetic construct
  source 1..21: mol_type = other DNA; mol_type = other DNA
tttactggtacatcttgctta

SEQ ID NO: 36013 - DNA, 21 bp, synthetic construct
  source 1..21: mol_type = other DNA; mol_type = other DNA
ttaaaggatggaacttgcatc

SEQ ID NO: 36014 - DNA, 21 bp, synthetic construct
  source 1..21: mol_type = other DNA; mol_type = other DNA
gattacgaaagtgcttgtgtt

SEQ ID NO: 36015 - DNA, 21 bp, synthetic construct
  source 1..21: mol_type = other DNA; mol_type = other DNA
aaagaagattttttaagctgg

SEQ ID NO: 36016 - DNA, 21 bp, synthetic construct
  source 1..21: mol_type = other DNA; mol_type = other DNA
ggcgtagaaatggttaggtgg

SEQ ID NO: 36017 - DNA, 21 bp, synthetic construct
  source 1..21: mol_type = other DNA; mol_type = other DNA
gttgatgagtttcttagttgg

SEQ ID NO: 36018 - DNA, 21 bp, synthetic construct
  source 1..21: mol_type = other DNA; mol_type = other DNA
tattttacagggaacattaat

SEQ ID NO: 36019 - DNA, 21 bp, synthetic construct
  source 1..21: mol_type = other DNA; mol_type = other DNA
tgttacccgcttcgccctgaa

SEQ ID NO: 36020 - DNA, 21 bp, synthetic construct
  source 1..21: mol_type = other DNA; mol_type = other DNA
tgtgacggaagttataaggcc

SEQ ID NO: 36021 - DNA, 21 bp, synthetic construct
  source 1..21: mol_type = other DNA; mol_type = other DNA
ttcgctcgtcatggatacaac

SEQ ID NO: 36022 - DNA, 21 bp, synthetic construct
  source 1..21: mol_type = other DNA; mol_type = other DNA
agtcaatgcacgagcagccct

SEQ ID NO: 36023 - DNA, 21 bp, synthetic construct
  source 1..21: mol_type = other DNA; mol_type = other DNA
gccatggaatctacccagtgg

SEQ ID NO: 36024 - DNA, 21 bp, synthetic construct
  source 1..21: mol_type = other DNA; mol_type = other DNA
tgtaagccaccctcagatatg

SEQ ID NO: 36025 - DNA, 21 bp, synthetic construct
  source 1..21: mol_type = other DNA; mol_type = other DNA
gggtgtcgtccctgtagcgag

SEQ ID NO: 36026 - DNA, 21 bp, synthetic construct
  source 1..21: mol_type = other DNA; mol_type = other DNA
cgcagcgagacatcatattgg

SEQ ID NO: 36027 - DNA, 21 bp, synthetic construct
  source 1..21: mol_type = other DNA; mol_type = other DNA
tttagtagactaggcataaac

SEQ ID NO: 36028 - DNA, 21 bp, synthetic construct
  source 1..21: mol_type = other DNA; mol_type = other DNA
tgtgattacggcagccgctcg

SEQ ID NO: 36029 - DNA, 21 bp, synthetic construct
  source 1..21: mol_type = other DNA; mol_type = other DNA
gagatggagagctttaactgg

SEQ ID NO: 36030 - DNA, 21 bp, synthetic construct
  source 1..21: mol_type = other DNA; mol_type = other DNA
tacggccgggggtgctgcggt

SEQ ID NO: 36031 - DNA, 21 bp, synthetic construct
  source 1..21: mol_type = other DNA; mol_type = other DNA
tggagccggataggtcccaac

SEQ ID NO: 36032 - DNA, 21 bp, synthetic construct
  source 1..21: mol_type = other DNA; mol_type = other DNA
tgcacatcgaaaactaatcat

SEQ ID NO: 36033 - DNA, 21 bp, synthetic construct
  source 1..21: mol_type = other DNA; mol_type = other DNA
agcaccggcaccagctgtctc

SEQ ID NO: 36034 - DNA, 21 bp, synthetic construct
  source 1..21: mol_type = other DNA; mol_type = other DNA
aagaaaggtagctgcgagcag

SEQ ID NO: 36035 - DNA, 21 bp, synthetic construct
  source 1..21: mol_type = other DNA; mol_type = other DNA
aagaacgactaccttatctat

SEQ ID NO: 36036 - DNA, 21 bp, synthetic construct
  source 1..21: mol_type = other DNA; mol_type = other DNA
tgtggcaaagactgctgtccc

SEQ ID NO: 36037 - DNA, 21 bp, synthetic construct
  source 1..21: mol_type = other DNA; mol_type = other DNA
agagacgagttcgttatgttc

SEQ ID NO: 36038 - DNA, 21 bp, synthetic construct
  source 1..21: mol_type = other DNA; mol_type = other DNA
aaagacgatttcttgacatgg

SEQ ID NO: 36039 - DNA, 21 bp, synthetic construct
  source 1..21: mol_type = other DNA; mol_type = other DNA
aagtgtaaagagaacgaaccc

SEQ ID NO: 36040 - DNA, 21 bp, synthetic construct
  source 1..21: mol_type = other DNA; mol_type = other DNA
cggacgtacaatatgtatccg

SEQ ID NO: 36041 - DNA, 21 bp, synthetic construct
  source 1..21: mol_type = other DNA; mol_type = other DNA
gttgggtatgatcgcgggtgg

SEQ ID NO: 36042 - DNA, 21 bp, synthetic construct
  source 1..21: mol_type = other DNA; mol_type = other DNA
cgtctcgagtctagtctttgg

SEQ ID NO: 36043 - DNA, 21 bp, synthetic construct
  source 1..21: mol_type = other DNA; mol_type = other DNA
tgtaaactcgaatacaaggag

SEQ ID NO: 36044 - DNA, 21 bp, synthetic construct
  source 1..21: mol_type = other DNA; mol_type = other DNA
gtcaatgaattccttccttac

SEQ ID NO: 36045 - DNA, 21 bp, synthetic construct
  source 1..21: mol_type = other DNA; mol_type = other DNA
ttattcaaggaatgcggcggc

SEQ ID NO: 36046 - DNA, 21 bp, synthetic construct
  source 1..21: mol_type = other DNA; mol_type = other DNA
agcatgtcaagtgctatgtgg

SEQ ID NO: 36047 - DNA, 21 bp, synthetic construct
  source 1..21: mol_type = other DNA; mol_type = other DNA
cataaagagggatgtggctta

SEQ ID NO: 36048 - DNA, 21 bp, synthetic construct
  source 1..21: mol_type = other DNA; mol_type = other DNA
gtcgatgagtggcttccattt

SEQ ID NO: 36049 - DNA, 21 bp, synthetic construct
  source 1..21: mol_type = other DNA; mol_type = other DNA
tgcagaatcgagagtagagct

SEQ ID NO: 36050 - DNA, 21 bp, synthetic construct
  source 1..21: mol_type = other DNA; mol_type = other DNA
aaagatgggagttcttactgg

SEQ ID NO: 36051 - DNA, 21 bp, synthetic construct
  source 1..21: mol_type = other DNA; mol_type = other DNA
cctaaagggccctgtgacgca

SEQ ID NO: 36052 - DNA, 21 bp, synthetic construct
  source 1..21: mol_type = other DNA; mol_type = other DNA
gtcctacactccagcaactgg

SEQ ID NO: 36053 - DNA, 21 bp, synthetic construct
  source 1..21: mol_type = other DNA; mol_type = other DNA
gtttgttctaagaaaccggcg

SEQ ID NO: 36054 - DNA, 21 bp, synthetic construct
  source 1..21: mol_type = other DNA; mol_type = other DNA
gaccgcgggggttgtaaacct

SEQ ID NO: 36055 - DNA, 21 bp, synthetic construct
  source 1..21: mol_type = other DNA; mol_type = other DNA
tttgatggctacagtgcatat

SEQ ID NO: 36056 - DNA, 21 bp, synthetic construct
  source 1..21: mol_type = other DNA; mol_type = other DNA
ggcggtccaagctgtaaaccc

SEQ ID NO: 36057 - DNA, 21 bp, synthetic construct
  source 1..21: mol_type = other DNA; mol_type = other DNA
tgtatgagcgattcgaaagcg

SEQ ID NO: 36058 - DNA, 21 bp, synthetic construct
  source 1..21: mol_type = other DNA; mol_type = other DNA
gatctcatgtcagccggatgg

SEQ ID NO: 36059 - DNA, 21 bp, synthetic construct
  source 1..21: mol_type = other DNA; mol_type = other DNA
tacttcactcacaggtatgat

SEQ ID NO: 36060 - DNA, 21 bp, synthetic construct
  source 1..21: mol_type = other DNA; mol_type = other DNA
atgtgggacggaacatacgcc

SEQ ID NO: 36061 - DNA, 21 bp, synthetic construct
  source 1..21: mol_type = other DNA; mol_type = other DNA
tatagtcgcctcgattacgac

SEQ ID NO: 36062 - DNA, 21 bp, synthetic construct
  source 1..21: mol_type = other DNA; mol_type = other DNA
gatatgacaagttcacaatgg

SEQ ID NO: 36063 - DNA, 21 bp, synthetic construct
  source 1..21: mol_type = other DNA; mol_type = other DNA
gattatgcatcaatcaaatgg

SEQ ID NO: 36064 - DNA, 21 bp, synthetic construct
  source 1..21: mol_type = other DNA; mol_type = other DNA
atgggatacgaccgagggtgg

SEQ ID NO: 36065 - DNA, 21 bp, synthetic construct
  source 1..21: mol_type = other DNA; mol_type = other DNA
tattcacggctcggtttcaat

SEQ ID NO: 36066 - DNA, 21 bp, synthetic construct
  source 1..21: mol_type = other DNA; mol_type = other DNA
tgtaaggaggtaaaaggttgg

SEQ ID NO: 36067 - DNA, 21 bp, synthetic construct
  source 1..21: mol_type = other DNA; mol_type = other DNA
atcagagggatacatcatcag

SEQ ID NO: 36068 - DNA, 21 bp, synthetic construct
  source 1..21: mol_type = other DNA; mol_type = other DNA
tttgaagaacacccgagctgg

SEQ ID NO: 36069 - DNA, 21 bp, synthetic construct
  source 1..21: mol_type = other DNA; mol_type = other DNA
ggtggcgattggagcacttat

SEQ ID NO: 36070 - DNA, 21 bp, synthetic construct
  source 1..21: mol_type = other DNA; mol_type = other DNA
cttggtaggccatgctcggaa

SEQ ID NO: 36071 - DNA, 21 bp, synthetic construct
  source 1..21: mol_type = other DNA; mol_type = other DNA
tactttatggggcgtagcgat

SEQ ID NO: 36072 - DNA, 21 bp, synthetic construct
  source 1..21: mol_type = other DNA; mol_type = other DNA
atccataaatatgtagggggg

SEQ ID NO: 36073 - DNA, 21 bp, synthetic construct
  source 1..21: mol_type = other DNA; mol_type = other DNA
cgcgaggaattcaccgtgtgg

SEQ ID NO: 36074 - DNA, 21 bp, synthetic construct
  source 1..21: mol_type = other DNA; mol_type = other DNA
aaagatggctactcggtttgg

SEQ ID NO: 36075 - DNA, 21 bp, synthetic construct
  source 1..21: mol_type = other DNA; mol_type = other DNA
tggccctttggcatggatgcc

SEQ ID NO: 36076 - DNA, 21 bp, synthetic construct
  source 1..21: mol_type = other DNA; mol_type = other DNA
aaggaggactggactccttgg

SEQ ID NO: 36077 - DNA, 21 bp, synthetic construct
  source 1..21: mol_type = other DNA; mol_type = other DNA
gggactgaatatgttagttat

SEQ ID NO: 36078 - DNA, 21 bp, synthetic construct
  source 1..21: mol_type = other DNA; mol_type = other DNA
acaaatagttctaatggcgta

SEQ ID NO: 36079 - DNA, 21 bp, synthetic construct
  source 1..21: mol_type = other DNA; mol_type = other DNA
ctatggagtgggatagggcca

SEQ ID NO: 36080 - DNA, 21 bp, synthetic construct
  source 1..21: mol_type = other DNA; mol_type = other DNA
gtacccgagcgagtatgtggc

SEQ ID NO: 36081 - DNA, 21 bp, synthetic construct
  source 1..21: mol_type = other DNA; mol_type = other DNA
atcatgggcaaatgtcctggg

SEQ ID NO: 36082 - DNA, 21 bp, synthetic construct
  source 1..21: mol_type = other DNA; mol_type = other DNA
tacttcacaaaccagattaac

SEQ ID NO: 36083 - DNA, 21 bp, synthetic construct
  source 1..21: mol_type = other DNA; mol_type = other DNA
tgtaagcctcttatgctggaa

SEQ ID NO: 36084 - DNA, 21 bp, synthetic construct
  source 1..21: mol_type = other DNA; mol_type = other DNA
aacatggccagttccggctgg

SEQ ID NO: 36085 - DNA, 21 bp, synthetic construct
  source 1..21: mol_type = other DNA; mol_type = other DNA
ttgcatcgcttatgtcctgat

SEQ ID NO: 36086 - DNA, 21 bp, synthetic construct
  source 1..21: mol_type = other DNA; mol_type = other DNA
ggccgcgatggggtacgttgg

SEQ ID NO: 36087 - DNA, 21 bp, synthetic construct
  source 1..21: mol_type = other DNA; mol_type = other DNA
agactggaatcaatcaactgg

SEQ ID NO: 36088 - DNA, 21 bp, synthetic construct
  source 1..21: mol_type = other DNA; mol_type = other DNA
ctctgggatgggacttttgca

SEQ ID NO: 36089 - DNA, 21 bp, synthetic construct
  source 1..21: mol_type = other DNA; mol_type = other DNA
tatagcaaatataatcccaac

SEQ ID NO: 36090 - DNA, 21 bp, synthetic construct
  source 1..21: mol_type = other DNA; mol_type = other DNA
aggagcgagttccgatcatac

SEQ ID NO: 36091 - DNA, 21 bp, synthetic construct
  source 1..21: mol_type = other DNA; mol_type = other DNA
ctcgctacgggggacggcccc

SEQ ID NO: 36092 - DNA, 21 bp, synthetic construct
  source 1..21: mol_type = other DNA; mol_type = other DNA
accgatgagtggcagagctat

SEQ ID NO: 36093 - DNA, 21 bp, synthetic construct
  source 1..21: mol_type = other DNA; mol_type = other DNA
ataccccgcacatgtccgccg

SEQ ID NO: 36094 - DNA, 21 bp, synthetic construct
  source 1..21: mol_type = other DNA; mol_type = other DNA
atgacaggcgttagctgcctt

SEQ ID NO: 36095 - DNA, 21 bp, synthetic construct
  source 1..21: mol_type = other DNA; mol_type = other DNA
gacttttacggcacaccatct

SEQ ID NO: 36096 - DNA, 21 bp, synthetic construct
  source 1..21: mol_type = other DNA; mol_type = other DNA
cgaaacgacaccgtatattgg

SEQ ID NO: 36097 - DNA, 21 bp, synthetic construct
  source 1..21: mol_type = other DNA; mol_type = other DNA
gacctaaggactgcgtcatgg

SEQ ID NO: 36098 - DNA, 21 bp, synthetic construct
  source 1..21: mol_type = other DNA; mol_type = other DNA
acatgggacggtttattggca

SEQ ID NO: 36099 - DNA, 21 bp, synthetic construct
  source 1..21: mol_type = other DNA; mol_type = other DNA
atgttcgatggttcgtcggct

SEQ ID NO: 36100 - DNA, 21 bp, synthetic construct
  source 1..21: mol_type = other DNA; mol_type = other DNA
ctatgtaaaccatgtaagacc

SEQ ID NO: 36101 - DNA, 21 bp, synthetic construct
  source 1..21: mol_type = other DNA; mol_type = other DNA
tgtaaagatgggtgctgctct

SEQ ID NO: 36102 - DNA, 21 bp, synthetic construct
  source 1..21: mol_type = other DNA; mol_type = other DNA
tacagtcgtgttggttataat

SEQ ID NO: 36103 - DNA, 21 bp, synthetic construct
  source 1..21: mol_type = other DNA; mol_type = other DNA
tgcaaagcccgtgattgctgc

SEQ ID NO: 36104 - DNA, 21 bp, synthetic construct
  source 1..21: mol_type = other DNA; mol_type = other DNA
ttgtgcaagtcctgcctcacg

SEQ ID NO: 36105 - DNA, 21 bp, synthetic construct
  source 1..21: mol_type = other DNA; mol_type = other DNA
cggagtcctaccagctattgg

SEQ ID NO: 36106 - DNA, 21 bp, synthetic construct
  source 1..21: mol_type = other DNA; mol_type = other DNA
aatagcgagtatttgccgttc

SEQ ID NO: 36107 - DNA, 21 bp, synthetic construct
  source 1..21: mol_type = other DNA; mol_type = other DNA
ctttgtaagccgtgtctacac

SEQ ID NO: 36108 - DNA, 21 bp, synthetic construct
  source 1..21: mol_type = other DNA; mol_type = other DNA
ggcggagaattttcaacttgg

SEQ ID NO: 36109 - DNA, 21 bp, synthetic construct
  source 1..21: mol_type = other DNA; mol_type = other DNA
tgctttaagaaatctacctcg

SEQ ID NO: 36110 - DNA, 21 bp, synthetic construct
  source 1..21: mol_type = other DNA; mol_type = other DNA
tgtaaaccgggtacgtggcct

SEQ ID NO: 36111 - DNA, 21 bp, synthetic construct
  source 1..21: mol_type = other DNA; mol_type = other DNA
tacagtcgtgtaaaccctaat

SEQ ID NO: 36112 - DNA, 21 bp, synthetic construct
  source 1..21: mol_type = other DNA; mol_type = other DNA
ggctgtagacacggcatgata

SEQ ID NO: 36113 - DNA, 21 bp, synthetic construct
  source 1..21: mol_type = other DNA; mol_type = other DNA
ggcggtacaacgagctgttgg

SEQ ID NO: 36114 - DNA, 21 bp, synthetic construct
  source 1..21: mol_type = other DNA; mol_type = other DNA
tgcaatgatccgatgactgcc

SEQ ID NO: 36115 - DNA, 21 bp, synthetic construct
  source 1..21: mol_type = other DNA; mol_type = other DNA
ttgtgtaagcctatcctaacc

SEQ ID NO: 36116 - DNA, 21 bp, synthetic construct
  source 1..21: mol_type = other DNA; mol_type = other DNA
tactggccaggttgtaaggaa

SEQ ID NO: 36117 - DNA, 21 bp, synthetic construct
  source 1..21: mol_type = other DNA; mol_type = other DNA
tgtaagccgaaatgcccagta

SEQ ID NO: 36118 - DNA, 21 bp, synthetic construct
  source 1..21: mol_type = other DNA; mol_type = other DNA
tgtgggccggggaagtgttgt

SEQ ID NO: 36119 - DNA, 21 bp, synthetic construct
  source 1..21: mol_type = other DNA; mol_type = other DNA
tgtcacgacttcactgggagt

SEQ ID NO: 36120 - DNA, 21 bp, synthetic construct
  source 1..21: mol_type = other DNA; mol_type = other DNA
ggtgatggatcttgtaaggcg

SEQ ID NO: 36121 - DNA, 21 bp, synthetic construct
  source 1..21: mol_type = other DNA; mol_type = other DNA
acgaatccatttaataaacac

SEQ ID NO: 36122 - DNA, 21 bp, synthetic construct
  source 1..21: mol_type = other DNA; mol_type = other DNA
tgtgcaccgtatacgcacgaa

SEQ ID NO: 36123 - DNA, 21 bp, synthetic construct
  source 1..21: mol_type = other DNA; mol_type = other DNA
aggccggacttctgtcccttc

SEQ ID NO: 36124 - DNA, 21 bp, synthetic construct
  source 1..21: mol_type = other DNA; mol_type = other DNA
gacagtagctgggaaatgtgg

SEQ ID NO: 36125 - DNA, 21 bp, synthetic construct
  source 1..21: mol_type = other DNA; mol_type = other DNA
ggcaaagggacgaagtgcgga

SEQ ID NO: 36126 - DNA, 21 bp, synthetic construct
  source 1..21: mol_type = other DNA; mol_type = other DNA
taccatcgtagaggtccagac

SEQ ID NO: 36127 - DNA, 21 bp, synthetic construct
  source 1..21: mol_type = other DNA; mol_type = other DNA
gggagccctggagtggcgtgg

SEQ ID NO: 36128 - DNA, 21 bp, synthetic construct
  source 1..21: mol_type = other DNA; mol_type = other DNA
ggcagtactccctgctgtcgt

SEQ ID NO: 36129 - DNA, 21 bp, synthetic construct
  source 1..21: mol_type = other DNA; mol_type = other DNA
catgaagactcatgctccgca

SEQ ID NO: 36130 - DNA, 21 bp, synthetic construct
  source 1..21: mol_type = other DNA; mol_type = other DNA
tgcctccgagcgtgccgtcca

SEQ ID NO: 36131 - DNA, 21 bp, synthetic construct
  source 1..21: mol_type = other DNA; mol_type = other DNA
ggtggcgagcgcagttgctgg

SEQ ID NO: 36132 - DNA, 21 bp, synthetic construct
  source 1..21: mol_type = other DNA; mol_type = other DNA
agttgccaagacaggtcgtgg

SEQ ID NO: 36133 - DNA, 21 bp, synthetic construct
  source 1..21: mol_type = other DNA; mol_type = other DNA
ggatcgccttgtacgccctgg

SEQ ID NO: 36134 - DNA, 21 bp, synthetic construct
  source 1..21: mol_type = other DNA; mol_type = other DNA
tgcgcgccatatttgggggag

SEQ ID NO: 36135 - DNA, 21 bp, synthetic construct
  source 1..21: mol_type = other DNA; mol_type = other DNA
cgcacgccctgcctcgggcca

SEQ ID NO: 36136 - DNA, 21 bp, synthetic construct
  source 1..21: mol_type = other DNA; mol_type = other DNA
tactcaaaatataattgtaat

SEQ ID NO: 36137 - DNA, 21 bp, synthetic construct
  source 1..21: mol_type = other DNA; mol_type = other DNA
tgcaaggacgtatgctgtgcg

SEQ ID NO: 36138 - DNA, 21 bp, synthetic construct
  source 1..21: mol_type = other DNA; mol_type = other DNA
cagaatgaatttctgccgtgg

SEQ ID NO: 36139 - DNA, 21 bp, synthetic construct
  source 1..21: mol_type = other DNA; mol_type = other DNA
tggacccccatgtgtcgtgca

SEQ ID NO: 36140 - DNA, 21 bp, synthetic construct
  source 1..21: mol_type = other DNA; mol_type = other DNA
tgtaaacctgaccactgggat

SEQ ID NO: 36141 - DNA, 21 bp, synthetic construct
  source 1..21: mol_type = other DNA; mol_type = other DNA
aactcagcttacgggttgcgc

SEQ ID NO: 36142 - DNA, 21 bp, synthetic construct
  source 1..21: mol_type = other DNA; mol_type = other DNA
gcgggatgcgacaggggttgg

SEQ ID NO: 36143 - DNA, 21 bp, synthetic construct
  source 1..21: mol_type = other DNA; mol_type = other DNA
tgcgcgccggattaccgagat

SEQ ID NO: 36144 - DNA, 21 bp, synthetic construct
  source 1..21: mol_type = other DNA; mol_type = other DNA
tggactccgatgtgtatggca

SEQ ID NO: 36145 - DNA, 21 bp, synthetic construct
  source 1..21: mol_type = other DNA; mol_type = other DNA
ttcgccaagtataattgtaat

SEQ ID NO: 36146 - DNA, 21 bp, synthetic construct
  source 1..21: mol_type = other DNA; mol_type = other DNA
ttatgtttgccttgttcagaa

SEQ ID NO: 36147 - DNA, 21 bp, synthetic construct
  source 1..21: mol_type = other DNA; mol_type = other DNA
tgcaaacctacctgctgcgaa

SEQ ID NO: 36148 - DNA, 21 bp, synthetic construct
  source 1..21: mol_type = other DNA; mol_type = other DNA
gggggagaattctccgcgtgg

SEQ ID NO: 36149 - DNA, 21 bp, synthetic construct
  source 1..21: mol_type = other DNA; mol_type = other DNA
ctcgcctataacgtttcaaca

SEQ ID NO: 36150 - DNA, 21 bp, synthetic construct
  source 1..21: mol_type = other DNA; mol_type = other DNA
gggggggactttgagcactgg

SEQ ID NO: 36151 - DNA, 21 bp, synthetic construct
  source 1..21: mol_type = other DNA; mol_type = other DNA
tgtaataaaccaatgactgga

SEQ ID NO: 36152 - DNA, 21 bp, synthetic construct
  source 1..21: mol_type = other DNA; mol_type = other DNA
tactctaaatacgggccgaac

SEQ ID NO: 36153 - DNA, 21 bp, synthetic construct
  source 1..21: mol_type = other DNA; mol_type = other DNA
tgcaagcctaagaaatgtgat

SEQ ID NO: 36154 - DNA, 21 bp, synthetic construct
  source 1..21: mol_type = other DNA; mol_type = other DNA
tttagtaaaatgttctacaat

SEQ ID NO: 36155 - DNA, 21 bp, synthetic construct
  source 1..21: mol_type = other DNA; mol_type = other DNA
aagtacgattatacaggattt

SEQ ID NO: 36156 - DNA, 21 bp, synthetic construct
  source 1..21: mol_type = other DNA; mol_type = other DNA
tgtaagccagatgaattcggc

SEQ ID NO: 36157 - DNA, 21 bp, synthetic construct
  source 1..21: mol_type = other DNA; mol_type = other DNA
acgcaatgtaaggaacactac

SEQ ID NO: 36158 - DNA, 21 bp, synthetic construct
  source 1..21: mol_type = other DNA; mol_type = other DNA
gcttgcgaccggagtcatacg

SEQ ID NO: 36159 - DNA, 21 bp, synthetic construct
  source 1..21: mol_type = other DNA; mol_type = other DNA
accaattgcgcgattaatgct

SEQ ID NO: 36160 - DNA, 21 bp, synthetic construct
  source 1..21: mol_type = other DNA; mol_type = other DNA
atttacgcaagctctacttgg

SEQ ID NO: 36161 - DNA, 21 bp, synthetic construct
  source 1..21: mol_type = other DNA; mol_type = other DNA
ccttgtaaggcaacatgtgta

SEQ ID NO: 36162 - DNA, 21 bp, synthetic construct
  source 1..21: mol_type = other DNA; mol_type = other DNA
tgcacaatgaaaacaggacac

SEQ ID NO: 36163 - DNA, 21 bp, synthetic construct
  source 1..21: mol_type = other DNA; mol_type = other DNA
aattcgtgtaacatgacgaga

SEQ ID NO: 36164 - DNA, 21 bp, synthetic construct
  source 1..21: mol_type = other DNA; mol_type = other DNA
ttgtgtaaaccgggcttaacc

SEQ ID NO: 36165 - DNA, 21 bp, synthetic construct
  source 1..21: mol_type = other DNA; mol_type = other DNA
ataaagaaaaattgctgtgcc

SEQ ID NO: 36166 - DNA, 21 bp, synthetic construct
  source 1..21: mol_type = other DNA; mol_type = other DNA
gttggtccggtcctatgttcg

SEQ ID NO: 36167 - DNA, 21 bp, synthetic construct
  source 1..21: mol_type = other DNA; mol_type = other DNA
gctggctatgaccgccactgg

SEQ ID NO: 36168 - DNA, 21 bp, synthetic construct
  source 1..21: mol_type = other DNA; mol_type = other DNA
gggggtgaatttgtgagctgg

SEQ ID NO: 36169 - DNA, 21 bp, synthetic construct
  source 1..21: mol_type = other DNA; mol_type = other DNA
tatgaaccgggctgtaaacat

SEQ ID NO: 36170 - DNA, 21 bp, synthetic construct
  source 1..21: mol_type = other DNA; mol_type = other DNA
atgacacaaacatcatgcctc

SEQ ID NO: 36171 - DNA, 21 bp, synthetic construct
  source 1..21: mol_type = other DNA; mol_type = other DNA
ctccatagattgtcggactgg

SEQ ID NO: 36172 - DNA, 21 bp, synthetic construct
  source 1..21: mol_type = other DNA; mol_type = other DNA
tgtaagcctcatcccttgttg

SEQ ID NO: 36173 - DNA, 21 bp, synthetic construct
  source 1..21: mol_type = other DNA; mol_type = other DNA
ttccatagatatggtccggat

SEQ ID NO: 36174 - DNA, 21 bp, synthetic construct
  source 1..21: mol_type = other DNA; mol_type = other DNA
catgaggatagttgcagtgct

SEQ ID NO: 36175 - DNA, 21 bp, synthetic construct
  source 1..21: mol_type = other DNA; mol_type = other DNA
tattcgaggtgtaatttaaac

SEQ ID NO: 36176 - DNA, 21 bp, synthetic construct
  source 1..21: mol_type = other DNA; mol_type = other DNA
aagtttgattatagctcctac

SEQ ID NO: 36177 - DNA, 21 bp, synthetic construct
  source 1..21: mol_type = other DNA; mol_type = other DNA
acagataaaagcgcaggttgt

SEQ ID NO: 36178 - DNA, 21 bp, synthetic construct
  source 1..21: mol_type = other DNA; mol_type = other DNA
gtccctgagttctgtccgtat

SEQ ID NO: 36179 - DNA, 21 bp, synthetic construct
  source 1..21: mol_type = other DNA; mol_type = other DNA
ggagaacccggctgtaaggag

SEQ ID NO: 36180 - DNA, 21 bp, synthetic construct
  source 1..21: mol_type = other DNA; mol_type = other DNA
tgcgggtacactaaccacgtg

SEQ ID NO: 36181 - DNA, 21 bp, synthetic construct
  source 1..21: mol_type = other DNA; mol_type = other DNA
tataggtttagtgagggtcgc

SEQ ID NO: 36182 - DNA, 21 bp, synthetic construct
  source 1..21: mol_type = other DNA; mol_type = other DNA
tgtttaaagcctactagttgt

SEQ ID NO: 36183 - DNA, 21 bp, synthetic construct
  source 1..21: mol_type = other DNA; mol_type = other DNA
gtgagcacccattgctacgca

SEQ ID NO: 36184 - DNA, 21 bp, synthetic construct
  source 1..21: mol_type = other DNA; mol_type = other DNA
caaccgccctcatgcaaagca

SEQ ID NO: 36185 - DNA, 21 bp, synthetic construct
  source 1..21: mol_type = other DNA; mol_type = other DNA
tgtaaagatggcaagcattgc

SEQ ID NO: 36186 - DNA, 21 bp, synthetic construct
  source 1..21: mol_type = other DNA; mol_type = other DNA
tacggcccgggatgtaaggag

SEQ ID NO: 36187 - DNA, 21 bp, synthetic construct
  source 1..21: mol_type = other DNA; mol_type = other DNA
aagcacgaatttacagcgttc

SEQ ID NO: 36188 - DNA, 21 bp, synthetic construct
  source 1..21: mol_type = other DNA; mol_type = other DNA
ctgtgtaaaccattgctcacg

SEQ ID NO: 36189 - DNA, 21 bp, synthetic construct
  source 1..21: mol_type = other DNA; mol_type = other DNA
tactggacaggcatgatcgtc

SEQ ID NO: 36190 - DNA, 21 bp, synthetic construct
  source 1..21: mol_type = other DNA; mol_type = other DNA
tgcagtgagcaattcccgtgt

SEQ ID NO: 36191 - DNA, 21 bp, synthetic construct
  source 1..21: mol_type = other DNA; mol_type = other DNA
tattgtagggatggagagaat

SEQ ID NO: 36192 - DNA, 21 bp, synthetic construct
  source 1..21: mol_type = other DNA; mol_type = other DNA
ctagcggctagttgttgtgtg

SEQ ID NO: 36193 - DNA, 21 bp, synthetic construct
  source 1..21: mol_type = other DNA; mol_type = other DNA
tgtaagcccaacacctcgtgg

SEQ ID NO: 36194 - DNA, 21 bp, synthetic construct
  source 1..21: mol_type = other DNA; mol_type = other DNA
tgcgctccagaccaccgggaa

SEQ ID NO: 36195 - DNA, 21 bp, synthetic construct
  source 1..21: mol_type = other DNA; mol_type = other DNA
ttctgcaggccatgccccgtg

SEQ ID NO: 36196 - DNA, 21 bp, synthetic construct
  source 1..21: mol_type = other DNA; mol_type = other DNA
tttgccaagtgtaatattaac

SEQ ID NO: 36197 - DNA, 21 bp, synthetic construct
  source 1..21: mol_type = other DNA; mol_type = other DNA
tgtcatagactacccccatca

SEQ ID NO: 36198 - DNA, 21 bp, synthetic construct
  source 1..21: mol_type = other DNA; mol_type = other DNA
tggacacccatgtgtaaaccg

SEQ ID NO: 36199 - DNA, 21 bp, synthetic construct
  source 1..21: mol_type = other DNA; mol_type = other DNA
agcgacggggtgagttattgg

SEQ ID NO: 36200 - DNA, 21 bp, synthetic construct
  source 1..21: mol_type = other DNA; mol_type = other DNA
tacaaagggtcgtgtgagcaa

SEQ ID NO: 36201 - DNA, 21 bp, synthetic construct
  source 1..21: mol_type = other DNA; mol_type = other DNA
atgagcatgactacggacaat

SEQ ID NO: 36202 - DNA, 21 bp, synthetic construct
  source 1..21: mol_type = other DNA; mol_type = other DNA
tatagtcgtataggacctttt

SEQ ID NO: 36203 - DNA, 21 bp, synthetic construct
  source 1..21: mol_type = other DNA; mol_type = other DNA
tggtctgctattacttgcaat

SEQ ID NO: 36204 - DNA, 21 bp, synthetic construct
  source 1..21: mol_type = other DNA; mol_type = other DNA
agaagtgagttcagcgcattc

SEQ ID NO: 36205 - DNA, 21 bp, synthetic construct
  source 1..21: mol_type = other DNA; mol_type = other DNA
tgcaaggggtccatggagcag

SEQ ID NO: 36206 - DNA, 21 bp, synthetic construct
  source 1..21: mol_type = other DNA; mol_type = other DNA
gatactcttttacatctgaga

SEQ ID NO: 36207 - DNA, 21 bp, synthetic construct
  source 1..21: mol_type = other DNA; mol_type = other DNA
tgcggtatgttatgcacgtcc

SEQ ID NO: 36208 - DNA, 21 bp, synthetic construct
  source 1..21: mol_type = other DNA; mol_type = other DNA
tgcaaaccccagaatagctcg

SEQ ID NO: 36209 - DNA, 21 bp, synthetic construct
  source 1..21: mol_type = other DNA; mol_type = other DNA
tgtaaaggtgaatccgccatt

SEQ ID NO: 36210 - DNA, 21 bp, synthetic construct
  source 1..21: mol_type = other DNA; mol_type = other DNA
ggttgtcgtaaaggcgatatc

SEQ ID NO: 36211 - DNA, 21 bp, synthetic construct
  source 1..21: mol_type = other DNA; mol_type = other DNA
ggaaatacaggcatttgttac

SEQ ID NO: 36212 - DNA, 21 bp, synthetic construct
  source 1..21: mol_type = other DNA; mol_type = other DNA
tacgaacccggttgtaaatgg

SEQ ID NO: 36213 - DNA, 21 bp, synthetic construct
  source 1..21: mol_type = other DNA; mol_type = other DNA
aaggacgattacgttcccttt

SEQ ID NO: 36214 - DNA, 21 bp, synthetic construct
  source 1..21: mol_type = other DNA; mol_type = other DNA
cgggacgagtatacgagcttc

SEQ ID NO: 36215 - DNA, 21 bp, synthetic construct
  source 1..21: mol_type = other DNA; mol_type = other DNA
gtccccgactttgttaaatgg

SEQ ID NO: 36216 - DNA, 21 bp, synthetic construct
  source 1..21: mol_type = other DNA; mol_type = other DNA
gggaacaaacactgcatggac

SEQ ID NO: 36217 - DNA, 21 bp, synthetic construct
  source 1..21: mol_type = other DNA; mol_type = other DNA
tgtaataaacccatgtatgca

SEQ ID NO: 36218 - DNA, 21 bp, synthetic construct
  source 1..21: mol_type = other DNA; mol_type = other DNA
acttatgacaacgtcttcaga

SEQ ID NO: 36219 - DNA, 21 bp, synthetic construct
  source 1..21: mol_type = other DNA; mol_type = other DNA
gtcagtgagttcaactcctac

SEQ ID NO: 36220 - DNA, 21 bp, synthetic construct
  source 1..21: mol_type = other DNA; mol_type = other DNA
tccacagagcgcgtttgcaga

SEQ ID NO: 36221 - DNA, 21 bp, synthetic construct
  source 1..21: mol_type = other DNA; mol_type = other DNA
aaggacgagtatactatgtat

SEQ ID NO: 36222 - DNA, 21 bp, synthetic construct
  source 1..21: mol_type = other DNA; mol_type = other DNA
taccacatcaaaagttgtgat

SEQ ID NO: 36223 - DNA, 21 bp, synthetic construct
  source 1..21: mol_type = other DNA; mol_type = other DNA
ttccatcgcatgaactcaaac

SEQ ID NO: 36224 - DNA, 21 bp, synthetic construct
  source 1..21: mol_type = other DNA; mol_type = other DNA
tgtaaggagggttgctgtaca

SEQ ID NO: 36225 - DNA, 21 bp, synthetic construct
  source 1..21: mol_type = other DNA; mol_type = other DNA
agagatgaatatagcgtttgg

SEQ ID NO: 36226 - DNA, 21 bp, synthetic construct
  source 1..21: mol_type = other DNA; mol_type = other DNA
ggctcggaaatgagccattgg

SEQ ID NO: 36227 - DNA, 21 bp, synthetic construct
  source 1..21: mol_type = other DNA; mol_type = other DNA
ccaatggaaagcccatcgtgg

SEQ ID NO: 36228 - DNA, 21 bp, synthetic construct
  source 1..21: mol_type = other DNA; mol_type = other DNA
ggaatgggaacctcgttgtgg

SEQ ID NO: 36229 - DNA, 21 bp, synthetic construct
  source 1..21: mol_type = other DNA; mol_type = other DNA
tgcaaggcggggtgttgcgct

SEQ ID NO: 36230 - DNA, 21 bp, synthetic construct
  source 1..21: mol_type = other DNA; mol_type = other DNA
tactttaccggacggtgggat

SEQ ID NO: 36231 - DNA, 21 bp, synthetic construct
  source 1..21: mol_type = other DNA; mol_type = other DNA
aggactcctacgtgcgtcaga

SEQ ID NO: 36232 - DNA, 21 bp, synthetic construct
  source 1..21: mol_type = other DNA; mol_type = other DNA
gaatggtccgcaatctgtaaa

SEQ ID NO: 36233 - DNA, 21 bp, synthetic construct
  source 1..21: mol_type = other DNA; mol_type = other DNA
tgtaagggttcgtgggagcaa

SEQ ID NO: 36234 - DNA, 21 bp, synthetic construct
  source 1..21: mol_type = other DNA; mol_type = other DNA
tactggagcggcatacatctc

SEQ ID NO: 36235 - DNA, 21 bp, synthetic construct
  source 1..21: mol_type = other DNA; mol_type = other DNA
tgctgtattaagaaatgtccg

SEQ ID NO: 36236 - DNA, 21 bp, synthetic construct
  source 1..21: mol_type = other DNA; mol_type = other DNA
ggtggtgagttcagtacctgg

SEQ ID NO: 36237 - DNA, 21 bp, synthetic construct
  source 1..21: mol_type = other DNA; mol_type = other DNA
tgcctcggtggatgctgttct

SEQ ID NO: 36238 - DNA, 21 bp, synthetic construct
  source 1..21: mol_type = other DNA; mol_type = other DNA
tgctcaagggacggtgagaac

SEQ ID NO: 36239 - DNA, 21 bp, synthetic construct
  source 1..21: mol_type = other DNA; mol_type = other DNA
tattctcggaagaaccttaat

SEQ ID NO: 36240 - DNA, 21 bp, synthetic construct
  source 1..21: mol_type = other DNA; mol_type = other DNA
tgtaaacctggaatgcggctc

SEQ ID NO: 36241 - protein, 7 aa, synthetic construct
CRPPPRL

SEQ ID NO: 36242 - protein, 7 aa, synthetic construct
CSKKATN

SEQ ID NO: 36243 - protein, 7 aa, synthetic construct
LHKLANN

SEQ ID NO: 36244 - protein, 7 aa, synthetic construct
MTGLSCL

SEQ ID NO: 36245 - protein, 7 aa, synthetic construct
LCKPCLH

SEQ ID NO: 36246 - protein, 7 aa, synthetic construct
LHKLSIN

SEQ ID NO: 36247 - protein, 7 aa, synthetic construct
LSKLSFN

SEQ ID NO: 36248 - protein, 7 aa, synthetic construct
IALKGWD

SEQ ID NO: 36249 - protein, 7 aa, synthetic construct
LSKLSIN

SEQ ID NO: 36250 - protein, 7 aa, synthetic construct
LHKLTVN

SEQ ID NO: 36251 - protein, 7 aa, synthetic construct
LHKLGDN

SEQ ID NO: 36252 - protein, 7 aa, synthetic construct
LHKLSVN

SEQ ID NO: 36253 - protein, 7 aa, synthetic construct
LHKLSPN

SEQ ID NO: 36254 - protein, 7 aa, synthetic construct
CKSGCCP

SEQ ID NO: 36255 - protein, 7 aa, synthetic construct
LHKLMPD

SEQ ID NO: 36256 - protein, 7 aa, synthetic construct
RLVDVFP

SEQ ID NO: 36257 - protein, 7 aa, synthetic construct
LHKLSEN

SEQ ID NO: 36258 - protein, 7 aa, synthetic construct
YSKLGPD

SEQ ID NO: 36259 - protein, 7 aa, synthetic construct
LHRLLDD

SEQ ID NO: 36260 - protein, 7 aa, synthetic construct
LHKLSMN

SEQ ID NO: 36261 - protein, 7 aa, synthetic construct
LSKLSYN

SEQ ID NO: 36262 - protein, 7 aa, synthetic construct
LHKLAQN

SEQ ID NO: 36263 - protein, 7 aa, synthetic construct
LTRLSAN

SEQ ID NO: 36264 - protein, 7 aa, synthetic construct
RLEDVFP

SEQ ID NO: 36265 - protein, 7 aa, synthetic construct
LHKLSFD

SEQ ID NO: 36266 - protein, 7 aa, synthetic construct
LHKLMNN

SEQ ID NO: 36267 - protein, 7 aa, synthetic construct
REDFVQW

SEQ ID NO: 36268 - protein, 7 aa, synthetic construct
LHKLSTN

SEQ ID NO: 36269 - protein, 7 aa, synthetic construct
LAKTGYN

SEQ ID NO: 36270 - protein, 7 aa, synthetic construct
LSRLGPD

SEQ ID NO: 36271 - protein, 7 aa, synthetic construct
RLESAIW

SEQ ID NO: 36272 - protein, 7 aa, synthetic construct
VLSASTW

SEQ ID NO: 36273 - protein, 7 aa, synthetic construct
VNDYTIF

SEQ ID NO: 36274 - protein, 7 aa, synthetic construct
LSRIGPD

SEQ ID NO: 36275 - protein, 7 aa, synthetic construct
LHKLGEN

SEQ ID NO: 36276 - protein, 7 aa, synthetic construct
PMEARSW

SEQ ID NO: 36277 - protein, 7 aa, synthetic construct
LHKLSPL

SEQ ID NO: 36278 - protein, 7 aa, synthetic construct
LHKLSLN

SEQ ID NO: 36279 - protein, 7 aa, synthetic construct
LHKLLND

SEQ ID NO: 36280 - protein, 7 aa, synthetic construct
LHKLSID

SEQ ID NO: 36281 - protein, 7 aa, synthetic construct
LHKLMPN

SEQ ID NO: 36282 - protein, 7 aa, synthetic construct
ILSSTTW

SEQ ID NO: 36283 - protein, 7 aa, synthetic construct
RTPTCKP

SEQ ID NO: 36284 - protein, 7 aa, synthetic construct
CAPDHRE

SEQ ID NO: 36285 - protein, 7 aa, synthetic construct
LHKLSVD

SEQ ID NO: 36286 - protein, 7 aa, synthetic construct
LHKLNNN

SEQ ID NO: 36287 - protein, 7 aa, synthetic construct
LAKSGPN

SEQ ID NO: 36288 - protein, 7 aa, synthetic construct
LSKLSPN

SEQ ID NO: 36289 - protein, 7 aa, synthetic construct
RTIDVFP

SEQ ID NO: 36290 - protein, 7 aa, synthetic construct
LHKLSPD

SEQ ID NO: 36291 - protein, 7 aa, synthetic construct
LTKLSPN

SEQ ID NO: 36292 - protein, 7 aa, synthetic construct
LTRLSPN

SEQ ID NO: 36293 - protein, 7 aa, synthetic construct
LHKLNPD

SEQ ID NO: 36294 - protein, 7 aa, synthetic construct
LHKLSHD

SEQ ID NO: 36295 - protein, 7 aa, synthetic construct
MHKLSPN

SEQ ID NO: 36296 - protein, 7 aa, synthetic construct
RTPEVFP

SEQ ID NO: 36297 - protein, 7 aa, synthetic construct
YLKSDTN

SEQ ID NO: 36298 - protein, 7 aa, synthetic construct
LCKPCLI

SEQ ID NO: 36299 - protein, 7 aa, synthetic construct
FHKLGIN

SEQ ID NO: 36300 - protein, 7 aa, synthetic construct
YVKSDVN

SEQ ID NO: 36301 - protein, 7 aa, synthetic construct
FHKLGPD

SEQ ID NO: 36302 - protein, 7 aa, synthetic construct
NALKGWD

SEQ ID NO: 36303 - protein, 7 aa, synthetic construct
LHKLQQN

SEQ ID NO: 36304 - protein, 7 aa, synthetic construct
LSKLSQN

SEQ ID NO: 36305 - protein, 7 aa, synthetic construct
LHKAGPN

SEQ ID NO: 36306 - protein, 7 aa, synthetic construct
YSKVGPK

SEQ ID NO: 36307 - protein, 7 aa, synthetic construct
PLMSRDW

SEQ ID NO: 36308 - protein, 7 aa, synthetic construct
KDEFTTF

SEQ ID NO: 36309 - protein, 7 aa, synthetic construct
YVKSQTG

SEQ ID NO: 36310 - protein, 7 aa, synthetic construct
RTLDVFP

SEQ ID NO: 36311 - protein, 7 aa, synthetic construct
LTRISPD

SEQ ID NO: 36312 - protein, 7 aa, synthetic construct
MHKLSVN

SEQ ID NO: 36313 - protein, 7 aa, synthetic construct
YFTGIVA

SEQ ID NO: 36314 - protein, 7 aa, synthetic construct
YVKSQLG

SEQ ID NO: 36315 - protein, 7 aa, synthetic construct
LHKLSTD

SEQ ID NO: 36316 - protein, 7 aa, synthetic construct
LHAKLPN

SEQ ID NO: 36317 - protein, 7 aa, synthetic construct
LHRLNPD

SEQ ID NO: 36318 - protein, 7 aa, synthetic construct
LARTGPD

SEQ ID NO: 36319 - protein, 7 aa, synthetic construct
RDETVFP

SEQ ID NO: 36320 - protein, 7 aa, synthetic construct
YSKVGPD

SEQ ID NO: 36321 - protein, 7 aa, synthetic construct
LSKLSDN

SEQ ID NO: 36322 - protein, 7 aa, synthetic construct
ILSSSNW

SEQ ID NO: 36323 - protein, 7 aa, synthetic construct
KDDFSTW

SEQ ID NO: 36324 - protein, 7 aa, synthetic construct
LHRKGID

SEQ ID NO: 36325 - protein, 7 aa, synthetic construct
YVKSDPG

SEQ ID NO: 36326 - protein, 7 aa, synthetic construct
LFDGTGP

SEQ ID NO: 36327 - protein, 7 aa, synthetic construct
EMASHGW

SEQ ID NO: 36328 - protein, 7 aa, synthetic construct
KDDFTSF

SEQ ID NO: 36329 - protein, 7 aa, synthetic construct
ILTSATW

SEQ ID NO: 36330 - protein, 7 aa, synthetic construct
YSKLNPL

SEQ ID NO: 36331 - protein, 7 aa, synthetic construct
LARLGPN

SEQ ID NO: 36332 - protein, 7 aa, synthetic construct
GGIGSVW

SEQ ID NO: 36333 - protein, 7 aa, synthetic construct
RIIDAFP

SEQ ID NO: 36334 - protein, 7 aa, synthetic construct
VLSSANW

SEQ ID NO: 36335 - protein, 7 aa, synthetic construct
RLADVFP

SEQ ID NO: 36336 - protein, 7 aa, synthetic construct
KDDFTTY

SEQ ID NO: 36337 - protein, 7 aa, synthetic construct
LFDGTAS

SEQ ID NO: 36338 - protein, 7 aa, synthetic construct
KDDFTTF

SEQ ID NO: 36339 - protein, 7 aa, synthetic construct
IATLGWD

SEQ ID NO: 36340 - protein, 7 aa, synthetic construct
YVKSDRG

SEQ ID NO: 36341 - protein, 7 aa, synthetic construct
YFTGILA

SEQ ID NO: 36342 - protein, 7 aa, synthetic construct
VLSSSMW

SEQ ID NO: 36343 - protein, 7 aa, synthetic construct
YVKSQTN

SEQ ID NO: 36344 - protein, 7 aa, synthetic construct
YSKAGGG

SEQ ID NO: 36345 - protein, 7 aa, synthetic construct
RLIDAFP

SEQ ID NO: 36346 - protein, 7 aa, synthetic construct
CTSKTLH

SEQ ID NO: 36347 - protein, 7 aa, synthetic construct
LSRIGPN

SEQ ID NO: 36348 - protein, 7 aa, synthetic construct
YFTGILE

SEQ ID NO: 36349 - protein, 7 aa, synthetic construct
RLEDAFP

SEQ ID NO: 36350 - protein, 7 aa, synthetic construct
LHKLNEN

SEQ ID NO: 36351 - protein, 7 aa, synthetic construct
ILSSSTW

SEQ ID NO: 36352 - protein, 7 aa, synthetic construct
RDDFVTW

SEQ ID NO: 36353 - protein, 7 aa, synthetic construct
VATKGWD

SEQ ID NO: 36354 - protein, 7 aa, synthetic construct
MHKLGVN

SEQ ID NO: 36355 - protein, 7 aa, synthetic construct
IMESAVW

SEQ ID NO: 36356 - protein, 7 aa, synthetic construct
RGLEGFD

SEQ ID NO: 36357 - protein, 7 aa, synthetic construct
YVKSDHG

SEQ ID NO: 36358 - protein, 7 aa, synthetic construct
YVKSQAG

SEQ ID NO: 36359 - protein, 7 aa, synthetic construct
LSRVGFD

SEQ ID NO: 36360 - protein, 7 aa, synthetic construct
LHKAGHN

SEQ ID NO: 36361 - protein, 7 aa, synthetic construct
KDEFSSW

SEQ ID NO: 36362 - protein, 7 aa, synthetic construct
VKSTNGV

SEQ ID NO: 36363 - protein, 7 aa, synthetic construct
ILSSQSW

SEQ ID NO: 36364 - protein, 7 aa, synthetic construct
LCKPCLQ

SEQ ID NO: 36365 - protein, 7 aa, synthetic construct
DLSSAKW

SEQ ID NO: 36366 - protein, 7 aa, synthetic construct
VASKGWD

SEQ ID NO: 36367 - protein, 7 aa, synthetic construct
KDDFTTW

SEQ ID NO: 36368 - protein, 7 aa, synthetic construct
NLASATW

SEQ ID NO: 36369 - protein, 7 aa, synthetic construct
LHRLGLD

SEQ ID NO: 36370 - protein, 7 aa, synthetic construct
EMASIKW

SEQ ID NO: 36371 - protein, 7 aa, synthetic construct
IAHLGWD

SEQ ID NO: 36372 - protein, 7 aa, synthetic construct
YFTGIIE

SEQ ID NO: 36373 - protein, 7 aa, synthetic construct
YTKTQTN

SEQ ID NO: 36374 - protein, 7 aa, synthetic construct
LSKLHTN

SEQ ID NO: 36375 - protein, 7 aa, synthetic construct
LSKASHN

SEQ ID NO: 36376 - protein, 7 aa, synthetic construct
KDEFLSW

SEQ ID NO: 36377 - protein, 7 aa, synthetic construct
YSKLNPM

SEQ ID NO: 36378 - protein, 7 aa, synthetic construct
LSRVGLN

SEQ ID NO: 36379 - protein, 7 aa, synthetic construct
YFTGIVE

SEQ ID NO: 36380 - protein, 7 aa, synthetic construct
YVKSDTS

SEQ ID NO: 36381 - protein, 7 aa, synthetic construct
PLASSTW

SEQ ID NO: 36382 - protein, 7 aa, synthetic construct
LCKPCLG

SEQ ID NO: 36383 - protein, 7 aa, synthetic construct
YSKLNPT

SEQ ID NO: 36384 - protein, 7 aa, synthetic construct
KDDFVSW

SEQ ID NO: 36385 - protein, 7 aa, synthetic construct
YHKLNPD

SEQ ID NO: 36386 - protein, 7 aa, synthetic construct
KDEFTGY

SEQ ID NO: 36387 - protein, 7 aa, synthetic construct
FHKLSPN

SEQ ID NO: 36388 - protein, 7 aa, synthetic construct
IANKGWD

SEQ ID NO: 36389 - protein, 7 aa, synthetic construct
RTETVFP

SEQ ID NO: 36390 - protein, 7 aa, synthetic construct
KDEFSTY

SEQ ID NO: 36391 - protein, 7 aa, synthetic construct
FHKLSLN

SEQ ID NO: 36392 - protein, 7 aa, synthetic construct
ILESRTW

SEQ ID NO: 36393 - protein, 7 aa, synthetic construct
REIDVYP

SEQ ID NO: 36394 - protein, 7 aa, synthetic construct
YSKLQAN

SEQ ID NO: 36395 - protein, 7 aa, synthetic construct
LTRLHPD

SEQ ID NO: 36396 - protein, 7 aa, synthetic construct
VANKGWD

SEQ ID NO: 36397 - protein, 7 aa, synthetic construct
VSEFLSY

SEQ ID NO: 36398 - protein, 7 aa, synthetic construct
YFTGKIA

SEQ ID NO: 36399 - protein, 7 aa, synthetic construct
PMASSTW

SEQ ID NO: 36400 - protein, 7 aa, synthetic construct
EALEGRD

SEQ ID NO: 36401 - protein, 7 aa, synthetic construct
YIKSQPG

SEQ ID NO: 36402 - protein, 7 aa, synthetic construct
RGLEGYD

SEQ ID NO: 36403 - protein, 7 aa, synthetic construct
RTPLVFP

SEQ ID NO: 36404 - protein, 7 aa, synthetic construct
WTPYCKA

SEQ ID NO: 36405 - protein, 7 aa, synthetic construct
YVKSDSM

SEQ ID NO: 36406 - protein, 7 aa, synthetic construct
KDDFVAW

SEQ ID NO: 36407 - protein, 7 aa, synthetic construct
NALEGRD

SEQ ID NO: 36408 - protein, 7 aa, synthetic construct
KDEFHSF

SEQ ID NO: 36409 - protein, 7 aa, synthetic construct
RGEHVFP

SEQ ID NO: 36410 - protein, 7 aa, synthetic construct
LFDGTPA

SEQ ID NO: 36411 - protein, 7 aa, synthetic construct
YHKLNLD

SEQ ID NO: 36412 - protein, 7 aa, synthetic construct
KMDSVRW

SEQ ID NO: 36413 - protein, 7 aa, synthetic construct
LHRLGPD

SEQ ID NO: 36414 - protein, 7 aa, synthetic construct
YVKSDAL

SEQ ID NO: 36415 - protein, 7 aa, synthetic construct
LSRVGYD

SEQ ID NO: 36416 - protein, 7 aa, synthetic construct
KDDFTSW

SEQ ID NO: 36417 - protein, 7 aa, synthetic construct
CKPREGT

SEQ ID NO: 36418 - protein, 7 aa, synthetic construct
LHKKGPD

SEQ ID NO: 36419 - protein, 7 aa, synthetic construct
LHKLNPL

SEQ ID NO: 36420 - protein, 7 aa, synthetic construct
KDDFTVY

SEQ ID NO: 36421 - protein, 7 aa, synthetic construct
LMADAYP

SEQ ID NO: 36422 - protein, 7 aa, synthetic construct
YSKLSDN

SEQ ID NO: 36423 - protein, 7 aa, synthetic construct
VQSTNGV

SEQ ID NO: 36424 - protein, 7 aa, synthetic construct
RLLDAYP

SEQ ID NO: 36425 - protein, 7 aa, synthetic construct
KDDFTMF

SEQ ID NO: 36426 - protein, 7 aa, synthetic construct
YVKSDMK

SEQ ID NO: 36427 - protein, 7 aa, synthetic construct
REDAVRW

SEQ ID NO: 36428 - protein, 7 aa, synthetic construct
REEGVSW

SEQ ID NO: 36429 - protein, 7 aa, synthetic construct
VKSTNGI

SEQ ID NO: 36430 - protein, 7 aa, synthetic construct
LRMSGCP

SEQ ID NO: 36431 - protein, 7 aa, synthetic construct
VESTNGR

SEQ ID NO: 36432 - protein, 7 aa, synthetic construct
LFDGTAA

SEQ ID NO: 36433 - protein, 7 aa, synthetic construct
YSAIGPN

SEQ ID NO: 36434 - protein, 7 aa, synthetic construct
LCKPCDT

SEQ ID NO: 36435 - protein, 7 aa, synthetic construct
LCKPCVT

SEQ ID NO: 36436 - protein, 7 aa, synthetic construct
RLDDVFP

SEQ ID NO: 36437 - protein, 7 aa, synthetic construct
LCKPCLD

SEQ ID NO: 36438 - protein, 7 aa, synthetic construct
LCKPCPT

SEQ ID NO: 36439 - protein, 7 aa, synthetic construct
YVKSQMG

SEQ ID NO: 36440 - protein, 7 aa, synthetic construct
VLSDRIW

SEQ ID NO: 36441 - protein, 7 aa, synthetic construct
LCKPCTT

SEQ ID NO: 36442 - protein, 7 aa, synthetic construct
LSRVGPN

SEQ ID NO: 36443 - protein, 7 aa, synthetic construct
RTDDVFP

SEQ ID NO: 36444 - protein, 7 aa, synthetic construct
DMASASW

SEQ ID NO: 36445 - protein, 7 aa, synthetic construct
YHAKLPN

SEQ ID NO: 36446 - protein, 7 aa, synthetic construct
ILASRDW

SEQ ID NO: 36447 - protein, 7 aa, synthetic construct
QLSSSTW

SEQ ID NO: 36448 - protein, 7 aa, synthetic construct
CTKSCCP

SEQ ID NO: 36449 - protein, 7 aa, synthetic construct
LHRLSPP

SEQ ID NO: 36450 - protein, 7 aa, synthetic construct
TLSSATW

SEQ ID NO: 36451 - protein, 7 aa, synthetic construct
VATKGAG

SEQ ID NO: 36452 - protein, 7 aa, synthetic construct
LHVKLPD

SEQ ID NO: 36453 - protein, 7 aa, synthetic construct
KDDFTAW

SEQ ID NO: 36454 - protein, 7 aa, synthetic construct
IMSSATW

SEQ ID NO: 36455 - protein, 7 aa, synthetic construct
DMASKTW

SEQ ID NO: 36456 - protein, 7 aa, synthetic construct
YVKSDKM

SEQ ID NO: 36457 - protein, 7 aa, synthetic construct
YVKSDVR

SEQ ID NO: 36458 - protein, 7 aa, synthetic construct
YVKSDSR

SEQ ID NO: 36459 - protein, 7 aa, synthetic construct
LARSGPN

SEQ ID NO: 36460 - protein, 7 aa, synthetic construct
YVKSQTM

SEQ ID NO: 36461 - protein, 7 aa, synthetic construct
KDEFSTW

SEQ ID NO: 36462 - protein, 7 aa, synthetic construct
DLSSSKW

SEQ ID NO: 36463 - protein, 7 aa, synthetic construct
RGETVFP

SEQ ID NO: 36464 - protein, 7 aa, synthetic construct
KDDFTHF

SEQ ID NO: 36465 - protein, 7 aa, synthetic construct
YVKSQPT

SEQ ID NO: 36466 - protein, 7 aa, synthetic construct
LCRPCSH

SEQ ID NO: 36467 - protein, 7 aa, synthetic construct
YVKSQML

SEQ ID NO: 36468 - protein, 7 aa, synthetic construct
GGLGSHW

SEQ ID NO: 36469 - protein, 7 aa, synthetic construct
YHVKSPN

SEQ ID NO: 36470 - protein, 7 aa, synthetic construct
RTDDTFP

SEQ ID NO: 36471 - protein, 7 aa, synthetic construct
YFTGVAL

SEQ ID NO: 36472 - protein, 7 aa, synthetic construct
DMSASTW

SEQ ID NO: 36473 - protein, 7 aa, synthetic construct
YHKLGPQ

SEQ ID NO: 36474 - protein, 7 aa, synthetic construct
IMASANW

SEQ ID NO: 36475 - protein, 7 aa, synthetic construct
YFTGFIE

SEQ ID NO: 36476 - protein, 7 aa, synthetic construct
YFTGVKE

SEQ ID NO: 36477 - protein, 7 aa, synthetic construct
YSKVGTN

SEQ ID NO: 36478 - protein, 7 aa, synthetic construct
YVKSQTS

SEQ ID NO: 36479 - protein, 7 aa, synthetic construct
RTDTVYP

SEQ ID NO: 36480 - protein, 7 aa, synthetic construct
RMLDAFP

SEQ ID NO: 36481 - protein, 7 aa, synthetic construct
KDDFSTY

SEQ ID NO: 36482 - protein, 7 aa, synthetic construct
YLKSQMT

SEQ ID NO: 36483 - protein, 7 aa, synthetic construct
YFSGIIE

SEQ ID NO: 36484 - protein, 7 aa, synthetic construct
MFDGTAA

SEQ ID NO: 36485 - protein, 7 aa, synthetic construct
YTKLQYN

SEQ ID NO: 36486 - protein, 7 aa, synthetic construct
RTETVYP

SEQ ID NO: 36487 - protein, 7 aa, synthetic construct
YSKLSLN

SEQ ID NO: 36488 - protein, 7 aa, synthetic construct
YVKSDRH

SEQ ID NO: 36489 - protein, 7 aa, synthetic construct
YVKSDMR

SEQ ID NO: 36490 - protein, 7 aa, synthetic construct
FHKLSTN

SEQ ID NO: 36491 - protein, 7 aa, synthetic construct
LARTGLN

SEQ ID NO: 36492 - protein, 7 aa, synthetic construct
LCRPCFE

SEQ ID NO: 36493 - protein, 7 aa, synthetic construct
LCKPCAT

SEQ ID NO: 36494 - protein, 7 aa, synthetic construct
REDMVRW

SEQ ID NO: 36495 - protein, 7 aa, synthetic construct
LSRVSIN

SEQ ID NO: 36496 - protein, 7 aa, synthetic construct
YVKSDTR

SEQ ID NO: 36497 - protein, 7 aa, synthetic construct
YTKSQTN

SEQ ID NO: 36498 - protein, 7 aa, synthetic construct
YFTGIME

SEQ ID NO: 36499 - protein, 7 aa, synthetic construct
RNLDVFP

SEQ ID NO: 36500 - protein, 7 aa, synthetic construct
VMESSKW

SEQ ID NO: 36501 - protein, 7 aa, synthetic construct
DLSSSSW

SEQ ID NO: 36502 - protein, 7 aa, synthetic construct
LFSGEGP

SEQ ID NO: 36503 - protein, 7 aa, synthetic construct
LSRLAIN

SEQ ID NO: 36504 - protein, 7 aa, synthetic construct
YHKMLPD

SEQ ID NO: 36505 - protein, 7 aa, synthetic construct
NLSSSTW

SEQ ID NO: 36506 - protein, 7 aa, synthetic construct
RMIDVYP

SEQ ID NO: 36507 - protein, 7 aa, synthetic construct
DLQARSW

SEQ ID NO: 36508 - protein, 7 aa, synthetic construct
FVKSDNR

SEQ ID NO: 36509 - protein, 7 aa, synthetic construct
RGENVFP

SEQ ID NO: 36510 - protein, 7 aa, synthetic construct
YHKLQFD

SEQ ID NO: 36511 - protein, 7 aa, synthetic construct
KSEFTTY

SEQ ID NO: 36512 - protein, 7 aa, synthetic construct
RLADAFP

SEQ ID NO: 36513 - protein, 7 aa, synthetic construct
FACMNSN

SEQ ID NO: 36514 - protein, 7 aa, synthetic construct
LTRVAPN

SEQ ID NO: 36515 - protein, 7 aa, synthetic construct
YFTGQVE

SEQ ID NO: 36516 - protein, 7 aa, synthetic construct
RNEFCTF

SEQ ID NO: 36517 - protein, 7 aa, synthetic construct
LCKSCLT

SEQ ID NO: 36518 - protein, 7 aa, synthetic construct
YFSGIPL

SEQ ID NO: 36519 - protein, 7 aa, synthetic construct
LHRLLHD

SEQ ID NO: 36520 - protein, 7 aa, synthetic construct
YHKLNPP

SEQ ID NO: 36521 - protein, 7 aa, synthetic construct
YAKHGPN

SEQ ID NO: 36522 - protein, 7 aa, synthetic construct
REDHVYW

SEQ ID NO: 36523 - protein, 7 aa, synthetic construct
YHKLNDN

SEQ ID NO: 36524 - protein, 7 aa, synthetic construct
LHKKSPD

SEQ ID NO: 36525 - protein, 7 aa, synthetic construct
VESREGI

SEQ ID NO: 36526 - protein, 7 aa, synthetic construct
YVKSDHM

SEQ ID NO: 36527 - protein, 7 aa, synthetic construct
YEPGCDE

SEQ ID NO: 36528 - protein, 7 aa, synthetic construct
VMPDAFP

SEQ ID NO: 36529 - protein, 7 aa, synthetic construct
IMSSNIW

SEQ ID NO: 36530 - protein, 7 aa, synthetic construct
LINDAYP

SEQ ID NO: 36531 - protein, 7 aa, synthetic construct
RTSDVYP

SEQ ID NO: 36532 - protein, 7 aa, synthetic construct
RLESTLW

SEQ ID NO: 36533 - protein, 7 aa, synthetic construct
IMASHGW

SEQ ID NO: 36534 - protein, 7 aa, synthetic construct
LHRLSLD

SEQ ID NO: 36535 - protein, 7 aa, synthetic construct
NGAGCCR

SEQ ID NO: 36536 - protein, 7 aa, synthetic construct
YHKLDNN

SEQ ID NO: 36537 - protein, 7 aa, synthetic construct
YFTGKVA

SEQ ID NO: 36538 - protein, 7 aa, synthetic construct
YVKSDSF

SEQ ID NO: 36539 - protein, 7 aa, synthetic construct
LHRLSAD

SEQ ID NO: 36540 - protein, 7 aa, synthetic construct
LHKMSMN

SEQ ID NO: 36541 - protein, 7 aa, synthetic construct
RDIDVFP

SEQ ID NO: 36542 - protein, 7 aa, synthetic construct
WWSGVME

SEQ ID NO: 36543 - protein, 7 aa, synthetic construct
PMESHSW

SEQ ID NO: 36544 - protein, 7 aa, synthetic construct
PMGSSTW

SEQ ID NO: 36545 - protein, 7 aa, synthetic construct
DLSSQTW

SEQ ID NO: 36546 - protein, 7 aa, synthetic construct
LHRLGMD

SEQ ID NO: 36547 - protein, 7 aa, synthetic construct
GSEFQTY

SEQ ID NO: 36548 - protein, 7 aa, synthetic construct
YVKHDVK

SEQ ID NO: 36549 - protein, 7 aa, synthetic construct
CGKRCVP

SEQ ID NO: 36550 - protein, 7 aa, synthetic construct
RTPQVFP

SEQ ID NO: 36551 - protein, 7 aa, synthetic construct
RGPEVFP

SEQ ID NO: 36552 - protein, 7 aa, synthetic construct
LARTGYD

SEQ ID NO: 36553 - protein, 7 aa, synthetic construct
LCKPCQT

SEQ ID NO: 36554 - protein, 7 aa, synthetic construct
LHRLSID

SEQ ID NO: 36555 - protein, 7 aa, synthetic construct
LSRVGHD

SEQ ID NO: 36556 - protein, 7 aa, synthetic construct
VMPDAYP

SEQ ID NO: 36557 - protein, 7 aa, synthetic construct
REEHVFP

SEQ ID NO: 36558 - protein, 7 aa, synthetic construct
ILSSSSW

SEQ ID NO: 36559 - protein, 7 aa, synthetic construct
YFTGIKD

SEQ ID NO: 36560 - protein, 7 aa, synthetic construct
LFDGTSA

SEQ ID NO: 36561 - protein, 7 aa, synthetic construct
YFTGITE

SEQ ID NO: 36562 - protein, 7 aa, synthetic construct
RTDHVFP

SEQ ID NO: 36563 - protein, 7 aa, synthetic construct
MHRLLPD

SEQ ID NO: 36564 - protein, 7 aa, synthetic construct
RTNEVFP

SEQ ID NO: 36565 - protein, 7 aa, synthetic construct
LTRLHAD

SEQ ID NO: 36566 - protein, 7 aa, synthetic construct
YTKLSPN

SEQ ID NO: 36567 - protein, 7 aa, synthetic construct
MFDGTSA

SEQ ID NO: 36568 - protein, 7 aa, synthetic construct
YFTGTIE

SEQ ID NO: 36569 - protein, 7 aa, synthetic construct
RLMDAFP

SEQ ID NO: 36570 - protein, 7 aa, synthetic construct
YFTGVLA

SEQ ID NO: 36571 - protein, 7 aa, synthetic construct
LSRIGMN

SEQ ID NO: 36572 - protein, 7 aa, synthetic construct
REDTVKW

SEQ ID NO: 36573 - protein, 7 aa, synthetic construct
EMASHSW

SEQ ID NO: 36574 - protein, 7 aa, synthetic construct
YVKSDTA

SEQ ID NO: 36575 - protein, 7 aa, synthetic construct
YVKSQLS

SEQ ID NO: 36576 - protein, 7 aa, synthetic construct
LSRLSFD

SEQ ID NO: 36577 - protein, 7 aa, synthetic construct
RLDNVYP

SEQ ID NO: 36578 - protein, 7 aa, synthetic construct
REENVYP

SEQ ID NO: 36579 - protein, 7 aa, synthetic construct
RALEGYD

SEQ ID NO: 36580 - protein, 7 aa, synthetic construct
DLRAATW

SEQ ID NO: 36581 - protein, 7 aa, synthetic construct
YLKSQQS

SEQ ID NO: 36582 - protein, 7 aa, synthetic construct
YFTGKVE

SEQ ID NO: 36583 - protein, 7 aa, synthetic construct
IMMDAYP

SEQ ID NO: 36584 - protein, 7 aa, synthetic construct
LHKLHTN

SEQ ID NO: 36585 - protein, 7 aa, synthetic construct
WWSGVKE

SEQ ID NO: 36586 - protein, 7 aa, synthetic construct
IMSSANW

SEQ ID NO: 36587 - protein, 7 aa, synthetic construct
LFSGDGP

SEQ ID NO: 36588 - protein, 7 aa, synthetic construct
DLASYKW

SEQ ID NO: 36589 - protein, 7 aa, synthetic construct
DMSSSKW

SEQ ID NO: 36590 - protein, 7 aa, synthetic construct
GCRPGCG

SEQ ID NO: 36591 - protein, 7 aa, synthetic construct
RTVDTYP

SEQ ID NO: 36592 - protein, 7 aa, synthetic construct
LHRLLPD

SEQ ID NO: 36593 - protein, 7 aa, synthetic construct
RTNDVFP

SEQ ID NO: 36594 - protein, 7 aa, synthetic construct
LHRLGAD

SEQ ID NO: 36595 - protein, 7 aa, synthetic construct
YIKSQLN

SEQ ID NO: 36596 - protein, 7 aa, synthetic construct
YSKLDRN

SEQ ID NO: 36597 - protein, 7 aa, synthetic construct
IESSNGR

SEQ ID NO: 36598 - protein, 7 aa, synthetic construct
LHRLSPL

SEQ ID NO: 36599 - protein, 7 aa, synthetic construct
PMESSKW

SEQ ID NO: 36600 - protein, 7 aa, synthetic construct
MHKLSEN

SEQ ID NO: 36601 - protein, 7 aa, synthetic construct
IHKLSAN

SEQ ID NO: 36602 - protein, 7 aa, synthetic construct
VMASSSW

SEQ ID NO: 36603 - protein, 7 aa, synthetic construct
RTEHVFP

SEQ ID NO: 36604 - protein, 7 aa, synthetic construct
VALEGRD

SEQ ID NO: 36605 - protein, 7 aa, synthetic construct
REVDVFP

SEQ ID NO: 36606 - protein, 7 aa, synthetic construct
IHRLGPD

SEQ ID NO: 36607 - protein, 7 aa, synthetic construct
YLKSQPY

SEQ ID NO: 36608 - protein, 7 aa, synthetic construct
KDEFSGY

SEQ ID NO: 36609 - protein, 7 aa, synthetic construct
LAKTAPN

SEQ ID NO: 36610 - protein, 7 aa, synthetic construct
IESTHGR

SEQ ID NO: 36611 - protein, 7 aa, synthetic construct
LHRLNPL

SEQ ID NO: 36612 - protein, 7 aa, synthetic construct
RDDFTSY

SEQ ID NO: 36613 - protein, 7 aa, synthetic construct
RGETVYP

SEQ ID NO: 36614 - protein, 7 aa, synthetic construct
RDETVYP

SEQ ID NO: 36615 - protein, 7 aa, synthetic construct
RDEFTTY

SEQ ID NO: 36616 - protein, 7 aa, synthetic construct
LSKAAFN

SEQ ID NO: 36617 - protein, 7 aa, synthetic construct
LHRLGGD

SEQ ID NO: 36618 - protein, 7 aa, synthetic construct
VESTNGA

SEQ ID NO: 36619 - protein, 7 aa, synthetic construct
LHRLSDN

SEQ ID NO: 36620 - protein, 7 aa, synthetic construct
RGPDVFP

SEQ ID NO: 36621 - protein, 7 aa, synthetic construct
LSRLSHD

SEQ ID NO: 36622 - protein, 7 aa, synthetic construct
LTRVSPD

SEQ ID NO: 36623 - protein, 7 aa, synthetic construct
RLESAAW

SEQ ID NO: 36624 - protein, 7 aa, synthetic construct
IMTDRIW

SEQ ID NO: 36625 - protein, 7 aa, synthetic construct
LRDGTPA

SEQ ID NO: 36626 - protein, 7 aa, synthetic construct
LSRIGQN

SEQ ID NO: 36627 - protein, 7 aa, synthetic construct
REDSVRW

SEQ ID NO: 36628 - protein, 7 aa, synthetic construct
LESREGI

SEQ ID NO: 36629 - protein, 7 aa, synthetic construct
LCRPCAE

SEQ ID NO: 36630 - protein, 7 aa, synthetic construct
NSLEGRD

SEQ ID NO: 36631 - protein, 7 aa, synthetic construct
VSEFLSF

SEQ ID NO: 36632 - protein, 7 aa, synthetic construct
LHRLGDD

SEQ ID NO: 36633 - protein, 7 aa, synthetic construct
RGVDVYP

SEQ ID NO: 36634 - protein, 7 aa, synthetic construct
YFTGHWE

SEQ ID NO: 36635 - protein, 7 aa, synthetic construct
YVKSDRM

SEQ ID NO: 36636 - protein, 7 aa, synthetic construct
RGDNVFP

SEQ ID NO: 36637 - protein, 7 aa, synthetic construct
LHKLSSD

SEQ ID NO: 36638 - protein, 7 aa, synthetic construct
MFDGTPA

SEQ ID NO: 36639 - protein, 7 aa, synthetic construct
LCKPCMT

SEQ ID NO: 36640 - protein, 7 aa, synthetic construct
RLMDAYP

SEQ ID NO: 36641 - protein, 7 aa, synthetic construct
ESDFKIW

SEQ ID NO: 36642 - protein, 7 aa, synthetic construct
VMEARNW

SEQ ID NO: 36643 - protein, 7 aa, synthetic construct
VLSDRLW

SEQ ID NO: 36644 - protein, 7 aa, synthetic construct
YFSGVVE

SEQ ID NO: 36645 - protein, 7 aa, synthetic construct
GSITSTW

SEQ ID NO: 36646 - protein, 7 aa, synthetic construct
YVKSQVS

SEQ ID NO: 36647 - protein, 7 aa, synthetic construct
RGPQVFP

SEQ ID NO: 36648 - protein, 7 aa, synthetic construct
YEPGCHE

SEQ ID NO: 36649 - protein, 7 aa, synthetic construct
RLMDVYP

SEQ ID NO: 36650 - protein, 7 aa, synthetic construct
PYAKSPM

SEQ ID NO: 36651 - protein, 7 aa, synthetic construct
LHKLQTD

SEQ ID NO: 36652 - protein, 7 aa, synthetic construct
LARTGMN

SEQ ID NO: 36653 - protein, 7 aa, synthetic construct
VMSSTTW

SEQ ID NO: 36654 - protein, 7 aa, synthetic construct
RTIDAFP

SEQ ID NO: 36655 - protein, 7 aa, synthetic construct
KDDFHTY

SEQ ID NO: 36656 - protein, 7 aa, synthetic construct
PYAKSVE

SEQ ID NO: 36657 - protein, 7 aa, synthetic construct
LTRLQIN

SEQ ID NO: 36658 - protein, 7 aa, synthetic construct
YFTGVLQ

SEQ ID NO: 36659 - protein, 7 aa, synthetic construct
LCKPCLM

SEQ ID NO: 36660 - protein, 7 aa, synthetic construct
PMSSSSW

SEQ ID NO: 36661 - protein, 7 aa, synthetic construct
LSKASVN

SEQ ID NO: 36662 - protein, 7 aa, synthetic construct
YVKHDPH

SEQ ID NO: 36663 - protein, 7 aa, synthetic construct
YHKLNPM

SEQ ID NO: 36664 - protein, 7 aa, synthetic construct
YLKSQPF

SEQ ID NO: 36665 - protein, 7 aa, synthetic construct
QNDFVFP

SEQ ID NO: 36666 - protein, 7 aa, synthetic construct
LHASGPN

SEQ ID NO: 36667 - protein, 7 aa, synthetic construct
FEGHVRF

SEQ ID NO: 36668 - protein, 7 aa, synthetic construct
DMSSSVW

SEQ ID NO: 36669 - protein, 7 aa, synthetic construct
ELASREW

SEQ ID NO: 36670 - protein, 7 aa, synthetic construct
RDIDVYP

SEQ ID NO: 36671 - protein, 7 aa, synthetic construct
REDSVYW

SEQ ID NO: 36672 - protein, 7 aa, synthetic construct
LHKHSQN

SEQ ID NO: 36673 - protein, 7 aa, synthetic construct
GDEFVHW

SEQ ID NO: 36674 - protein, 7 aa, synthetic construct
VMSSANW

SEQ ID NO: 36675 - protein, 7 aa, synthetic construct
LMNDAYP

SEQ ID NO: 36676 - protein, 7 aa, synthetic construct
VSTHCRA

SEQ ID NO: 36677 - protein, 7 aa, synthetic construct
YFSGIVE

SEQ ID NO: 36678 - protein, 7 aa, synthetic construct
LHRLGED

SEQ ID NO: 36679 - protein, 7 aa, synthetic construct
YLKYDPL

SEQ ID NO: 36680 - protein, 7 aa, synthetic construct
IMSASNW

SEQ ID NO: 36681 - protein, 7 aa, synthetic construct
LCKPCET

SEQ ID NO: 36682 - protein, 7 aa, synthetic construct
LCKPCLS

SEQ ID NO: 36683 - protein, 7 aa, synthetic construct
YTRLDPL

SEQ ID NO: 36684 - protein, 7 aa, synthetic construct
PMASSNW

SEQ ID NO: 36685 - protein, 7 aa, synthetic construct
YVKSQPF

SEQ ID NO: 36686 - protein, 7 aa, synthetic construct
YSRLLPD

SEQ ID NO: 36687 - protein, 7 aa, synthetic construct
VAEKGWD

SEQ ID NO: 36688 - protein, 7 aa, synthetic construct
LCKPCST

SEQ ID NO: 36689 - protein, 7 aa, synthetic construct
YHKAQMN

SEQ ID NO: 36690 - protein, 7 aa, synthetic construct
PMDSSRW

SEQ ID NO: 36691 - protein, 7 aa, synthetic construct
RKLDVYP

SEQ ID NO: 36692 - protein, 7 aa, synthetic construct
RTDDVYP

SEQ ID NO: 36693 - protein, 7 aa, synthetic construct
YHAAGPN

SEQ ID NO: 36694 - protein, 7 aa, synthetic construct
RTPQVYP

SEQ ID NO: 36695 - protein, 7 aa, synthetic construct
RGPDVYP

SEQ ID NO: 36696 - protein, 7 aa, synthetic construct
IMSSSSW

SEQ ID NO: 36697 - protein, 7 aa, synthetic construct
FHKLSNN

SEQ ID NO: 36698 - protein, 7 aa, synthetic construct
PMASATW

SEQ ID NO: 36699 - protein, 7 aa, synthetic construct
IMESRNW

SEQ ID NO: 36700 - protein, 7 aa, synthetic construct
DLRSSTW

SEQ ID NO: 36701 - protein, 7 aa, synthetic construct
RDEFTSF

SEQ ID NO: 36702 - protein, 7 aa, synthetic construct
LCAPCLT

SEQ ID NO: 36703 - protein, 7 aa, synthetic construct
NLASASW

SEQ ID NO: 36704 - protein, 7 aa, synthetic construct
YVKSQQL

SEQ ID NO: 36705 - protein, 7 aa, synthetic construct
LHKLNHD

SEQ ID NO: 36706 - protein, 7 aa, synthetic construct
YFTGIHE

SEQ ID NO: 36707 - protein, 7 aa, synthetic construct
VSEFEIY

SEQ ID NO: 36708 - protein, 7 aa, synthetic construct
LTRLHID

SEQ ID NO: 36709 - protein, 7 aa, synthetic construct
REDFVSW

SEQ ID NO: 36710 - protein, 7 aa, synthetic construct
MSRIGPN

SEQ ID NO: 36711 - protein, 7 aa, synthetic construct
APGSVRW

SEQ ID NO: 36712 - protein, 7 aa, synthetic construct
DLASREW

SEQ ID NO: 36713 - protein, 7 aa, synthetic construct
RNDDVFP

SEQ ID NO: 36714 - protein, 7 aa, synthetic construct
LSRVSDN

SEQ ID NO: 36715 - protein, 7 aa, synthetic construct
YHAKGLN

SEQ ID NO: 36716 - protein, 7 aa, synthetic construct
SMSSAIW

SEQ ID NO: 36717 - protein, 7 aa, synthetic construct
LRDGTSA

SEQ ID NO: 36718 - protein, 7 aa, synthetic construct
YFTGKLE

SEQ ID NO: 36719 - protein, 7 aa, synthetic construct
RLTDAYP

SEQ ID NO: 36720 - protein, 7 aa, synthetic construct
QMASVKW

SEQ ID NO: 36721 - protein, 7 aa, synthetic construct
RTSDVFP

SEQ ID NO: 36722 - protein, 7 aa, synthetic construct
VLSSSAW

SEQ ID NO: 36723 - protein, 7 aa, synthetic construct
LHRLGDN

SEQ ID NO: 36724 - protein, 7 aa, synthetic construct
RTPSVYP

SEQ ID NO: 36725 - protein, 7 aa, synthetic construct
IMASQTW

SEQ ID NO: 36726 - protein, 7 aa, synthetic construct
YVKSQVM

SEQ ID NO: 36727 - protein, 7 aa, synthetic construct
LCKPCIT

SEQ ID NO: 36728 - protein, 7 aa, synthetic construct
YFSGVKE

SEQ ID NO: 36729 - protein, 7 aa, synthetic construct
YHKLQVF

SEQ ID NO: 36730 - protein, 7 aa, synthetic construct
RDDFTTF

SEQ ID NO: 36731 - protein, 7 aa, synthetic construct
REDFTTW

SEQ ID NO: 36732 - protein, 7 aa, synthetic construct
KDDFVSY

SEQ ID NO: 36733 - protein, 7 aa, synthetic construct
LHRLSVV

SEQ ID NO: 36734 - protein, 7 aa, synthetic construct
DMGSHKW

SEQ ID NO: 36735 - protein, 7 aa, synthetic construct
YIKHDPM

SEQ ID NO: 36736 - protein, 7 aa, synthetic construct
YVKSQPY

SEQ ID NO: 36737 - protein, 7 aa, synthetic construct
VPEFCRP

SEQ ID NO: 36738 - protein, 7 aa, synthetic construct
RMIDAYP

SEQ ID NO: 36739 - protein, 7 aa, synthetic construct
KSDFVSW

SEQ ID NO: 36740 - protein, 7 aa, synthetic construct
RTGDAYP

SEQ ID NO: 36741 - protein, 7 aa, synthetic construct
YHKLNEN

SEQ ID NO: 36742 - protein, 7 aa, synthetic construct
LSRVGGN

SEQ ID NO: 36743 - protein, 7 aa, synthetic construct
RMEVSTW

SEQ ID NO: 36744 - protein, 7 aa, synthetic construct
RMLDAYP

SEQ ID NO: 36745 - protein, 7 aa, synthetic construct
LHRLGQD

SEQ ID NO: 36746 - protein, 7 aa, synthetic construct
LSRLSPI

SEQ ID NO: 36747 - protein, 7 aa, synthetic construct
YVRSDKG

SEQ ID NO: 36748 - protein, 7 aa, synthetic construct
LKDGTCS

SEQ ID NO: 36749 - protein, 7 aa, synthetic construct
LCKPCLL

SEQ ID NO: 36750 - protein, 7 aa, synthetic construct
LHRLSTP

SEQ ID NO: 36751 - protein, 7 aa, synthetic construct
YSKLQKN

SEQ ID NO: 36752 - protein, 7 aa, synthetic construct
FSRIGPD

SEQ ID NO: 36753 - protein, 7 aa, synthetic construct
YHKLNSN

SEQ ID NO: 36754 - protein, 7 aa, synthetic construct
YFTGTKE

SEQ ID NO: 36755 - protein, 7 aa, synthetic construct
KSDFVVY

SEQ ID NO: 36756 - protein, 7 aa, synthetic construct
VMEARDW

SEQ ID NO: 36757 - protein, 7 aa, synthetic construct
RSDFVVY

SEQ ID NO: 36758 - protein, 7 aa, synthetic construct
YFTGHID

SEQ ID NO: 36759 - protein, 7 aa, synthetic construct
CTKPCCP

SEQ ID NO: 36760 - protein, 7 aa, synthetic construct
REDGVRW

SEQ ID NO: 36761 - protein, 7 aa, synthetic construct
DMGSSVW

SEQ ID NO: 36762 - protein, 7 aa, synthetic construct
RLESREW

SEQ ID NO: 36763 - protein, 7 aa, synthetic construct
RDEFIAW

SEQ ID NO: 36764 - protein, 7 aa, synthetic construct
YSKLSMN

SEQ ID NO: 36765 - protein, 7 aa, synthetic construct
LTRLSVD

SEQ ID NO: 36766 - protein, 7 aa, synthetic construct
RDDFTTW

SEQ ID NO: 36767 - protein, 7 aa, synthetic construct
PMASQQW

SEQ ID NO: 36768 - protein, 7 aa, synthetic construct
RGPEVYP

SEQ ID NO: 36769 - protein, 7 aa, synthetic construct
LHRLGYD

SEQ ID NO: 36770 - protein, 7 aa, synthetic construct
DLESRKW

SEQ ID NO: 36771 - protein, 7 aa, synthetic construct
VLSSNIW

SEQ ID NO: 36772 - protein, 7 aa, synthetic construct
YFTGKKE

SEQ ID NO: 36773 - protein, 7 aa, synthetic construct
VSDFKIY

SEQ ID NO: 36774 - protein, 7 aa, synthetic construct
ILASATW

SEQ ID NO: 36775 - protein, 7 aa, synthetic construct
VLSSSQW

SEQ ID NO: 36776 - protein, 7 aa, synthetic construct
YFTGVIQ

SEQ ID NO: 36777 - protein, 7 aa, synthetic construct
YFTGIRE

SEQ ID NO: 36778 - protein, 7 aa, synthetic construct
YHKLNNN

SEQ ID NO: 36779 - protein, 7 aa, synthetic construct
CKDPCCG

SEQ ID NO: 36780 - protein, 7 aa, synthetic construct
YFSGITA

SEQ ID NO: 36781 - protein, 7 aa, synthetic construct
DLSSSQW

SEQ ID NO: 36782 - protein, 7 aa, synthetic construct
DMSSHKW

SEQ ID NO: 36783 - protein, 7 aa, synthetic construct
NALRGWD

SEQ ID NO: 36784 - protein, 7 aa, synthetic construct
VMESRKW

SEQ ID NO: 36785 - protein, 7 aa, synthetic construct
GDEYHSY

SEQ ID NO: 36786 - protein, 7 aa, synthetic construct
IATRGIG

SEQ ID NO: 36787 - protein, 7 aa, synthetic construct
KDEFKSW

SEQ ID NO: 36788 - protein, 7 aa, synthetic construct
LHRLTTD

SEQ ID NO: 36789 - protein, 7 aa, synthetic construct
LSRLSSD

SEQ ID NO: 36790 - protein, 7 aa, synthetic construct
YHKLNPL

SEQ ID NO: 36791 - protein, 7 aa, synthetic construct
RGDDVYP

SEQ ID NO: 36792 - protein, 7 aa, synthetic construct
VESFNGR

SEQ ID NO: 36793 - protein, 7 aa, synthetic construct
LSRTSVN

SEQ ID NO: 36794 - protein, 7 aa, synthetic construct
RGDDVFP

SEQ ID NO: 36795 - protein, 7 aa, synthetic construct
YSKLNEM

SEQ ID NO: 36796 - protein, 7 aa, synthetic construct
LSRLSPN

SEQ ID NO: 36797 - protein, 7 aa, synthetic construct
EMDSRMW

SEQ ID NO: 36798 - protein, 7 aa, synthetic construct
VMESRDW

SEQ ID NO: 36799 - protein, 7 aa, synthetic construct
RDETSHW

SEQ ID NO: 36800 - protein, 7 aa, synthetic construct
PLDSRSW

SEQ ID NO: 36801 - protein, 7 aa, synthetic construct
RDDFTMY

SEQ ID NO: 36802 - protein, 7 aa, synthetic construct
IHRLLSD

SEQ ID NO: 36803 - protein, 7 aa, synthetic construct
LHRLMED

SEQ ID NO: 36804 - protein, 7 aa, synthetic construct
LHKKGEN

SEQ ID NO: 36805 - protein, 7 aa, synthetic construct
RGESVYP

SEQ ID NO: 36806 - protein, 7 aa, synthetic construct
YFTGFMD

SEQ ID NO: 36807 - protein, 7 aa, synthetic construct
YVKSQMM

SEQ ID NO: 36808 - protein, 7 aa, synthetic construct
PMESVKW

SEQ ID NO: 36809 - protein, 7 aa, synthetic construct
YFAGIKE

SEQ ID NO: 36810 - protein, 7 aa, synthetic construct
YFTGIHA

SEQ ID NO: 36811 - protein, 7 aa, synthetic construct
LHRLSDP

SEQ ID NO: 36812 - protein, 7 aa, synthetic construct
DLSSQKW

SEQ ID NO: 36813 - protein, 7 aa, synthetic construct
LTRLHTD

SEQ ID NO: 36814 - protein, 7 aa, synthetic construct
MRDGTPA

SEQ ID NO: 36815 - protein, 7 aa, synthetic construct
RSLDVYP

SEQ ID NO: 36816 - protein, 7 aa, synthetic construct
RDEFTAW

SEQ ID NO: 36817 - protein, 7 aa, synthetic construct
YHKKQEN

SEQ ID NO: 36818 - protein, 7 aa, synthetic construct
RGPEIYP

SEQ ID NO: 36819 - protein, 7 aa, synthetic construct
DLTSAKW

SEQ ID NO: 36820 - protein, 7 aa, synthetic construct
LCKPCNT

SEQ ID NO: 36821 - protein, 7 aa, synthetic construct
REDGVSW

SEQ ID NO: 36822 - protein, 7 aa, synthetic construct
RTPVVYP

SEQ ID NO: 36823 - protein, 7 aa, synthetic construct
YFSGVKA

SEQ ID NO: 36824 - protein, 7 aa, synthetic construct
GSEFSTW

SEQ ID NO: 36825 - protein, 7 aa, synthetic construct
LARQSYN

SEQ ID NO: 36826 - protein, 7 aa, synthetic construct
LSRLSPD

SEQ ID NO: 36827 - protein, 7 aa, synthetic construct
DLRSANW

SEQ ID NO: 36828 - protein, 7 aa, synthetic construct
AGGGLYV

SEQ ID NO: 36829 - protein, 7 aa, synthetic construct
YFTGQKE

SEQ ID NO: 36830 - protein, 7 aa, synthetic construct
DMQSSTW

SEQ ID NO: 36831 - protein, 7 aa, synthetic construct
LSRISFN

SEQ ID NO: 36832 - protein, 7 aa, synthetic construct
DLTSRDW

SEQ ID NO: 36833 - protein, 7 aa, synthetic construct
YFAGKKD

SEQ ID NO: 36834 - protein, 7 aa, synthetic construct
LHRLGPN

SEQ ID NO: 36835 - protein, 7 aa, synthetic construct
LMTDRTW

SEQ ID NO: 36836 - protein, 7 aa, synthetic construct
RTDVVYP

SEQ ID NO: 36837 - protein, 7 aa, synthetic construct
DLRSVTW

SEQ ID NO: 36838 - protein, 7 aa, synthetic construct
VAEGLRW

SEQ ID NO: 36839 - protein, 7 aa, synthetic construct
LHRLQDN

SEQ ID NO: 36840 - protein, 7 aa, synthetic construct
YHKLNAN

SEQ ID NO: 36841 - protein, 7 aa, synthetic construct
LSRISTN

SEQ ID NO: 36842 - protein, 7 aa, synthetic construct
KDEFVSY

SEQ ID NO: 36843 - protein, 7 aa, synthetic construct
RDEFVSY

SEQ ID NO: 36844 - protein, 7 aa, synthetic construct
LHRLSVN

SEQ ID NO: 36845 - protein, 7 aa, synthetic construct
VTSSNGI

SEQ ID NO: 36846 - protein, 7 aa, synthetic construct
REEDVYP

SEQ ID NO: 36847 - protein, 7 aa, synthetic construct
TLGCPDR

SEQ ID NO: 36848 - protein, 7 aa, synthetic construct
YARTGPD

SEQ ID NO: 36849 - protein, 7 aa, synthetic construct
IAQVGWD

SEQ ID NO: 36850 - protein, 7 aa, synthetic construct
VATKGIG

SEQ ID NO: 36851 - protein, 7 aa, synthetic construct
LCKPCHT

SEQ ID NO: 36852 - protein, 7 aa, synthetic construct
ITSTNGR

SEQ ID NO: 36853 - protein, 7 aa, synthetic construct
RLESSSW

SEQ ID NO: 36854 - protein, 7 aa, synthetic construct
YFTGVTE

SEQ ID NO: 36855 - protein, 7 aa, synthetic construct
YVKSQPL

SEQ ID NO: 36856 - protein, 7 aa, synthetic construct
YFSGIVA

SEQ ID NO: 36857 - protein, 7 aa, synthetic construct
DMGSSTW

SEQ ID NO: 36858 - protein, 7 aa, synthetic construct
LCKPSLT

SEQ ID NO: 36859 - protein, 7 aa, synthetic construct
YFSKIIA

SEQ ID NO: 36860 - protein, 7 aa, synthetic construct
RSDVVYP

SEQ ID NO: 36861 - protein, 7 aa, synthetic construct
YIKGDYK

SEQ ID NO: 36862 - protein, 7 aa, synthetic construct
PMGSSSW

SEQ ID NO: 36863 - protein, 7 aa, synthetic construct
YFTGHMD

SEQ ID NO: 36864 - protein, 7 aa, synthetic construct
RGEDVYP

SEQ ID NO: 36865 - protein, 7 aa, synthetic construct
MFDGTMA

SEQ ID NO: 36866 - protein, 7 aa, synthetic construct
REETVRW

SEQ ID NO: 36867 - protein, 7 aa, synthetic construct
RTADAYP

SEQ ID NO: 36868 - protein, 7 aa, synthetic construct
LHKLQPD

SEQ ID NO: 36869 - protein, 7 aa, synthetic construct
NMASHTW

SEQ ID NO: 36870 - protein, 7 aa, synthetic construct
RLESAMW

SEQ ID NO: 36871 - protein, 7 aa, synthetic construct
LCRPCSA

SEQ ID NO: 36872 - protein, 7 aa, synthetic construct
YVRSDTG

SEQ ID NO: 36873 - protein, 7 aa, synthetic construct
YFTGVKD

SEQ ID NO: 36874 - protein, 7 aa, synthetic construct
RDEFTGY

SEQ ID NO: 36875 - protein, 7 aa, synthetic construct
YVKSQNG

SEQ ID NO: 36876 - protein, 7 aa, synthetic construct
DLTARNW

SEQ ID NO: 36877 - protein, 7 aa, synthetic construct
IMSSHGW

SEQ ID NO: 36878 - protein, 7 aa, synthetic construct
EMKARTW

SEQ ID NO: 36879 - protein, 7 aa, synthetic construct
YFSGKVE

SEQ ID NO: 36880 - protein, 7 aa, synthetic construct
YVKSQNM

SEQ ID NO: 36881 - protein, 7 aa, synthetic construct
LYDGTSA

SEQ ID NO: 36882 - protein, 7 aa, synthetic construct
IASLGWD

SEQ ID NO: 36883 - protein, 7 aa, synthetic construct
VGTKGWD

SEQ ID NO: 36884 - protein, 7 aa, synthetic construct
YLKSQQT

SEQ ID NO: 36885 - protein, 7 aa, synthetic construct
LSRIGHD

SEQ ID NO: 36886 - protein, 7 aa, synthetic construct
YVKSQPI

SEQ ID NO: 36887 - protein, 7 aa, synthetic construct
REEGVAW

SEQ ID NO: 36888 - protein, 7 aa, synthetic construct
KDDFTMY

SEQ ID NO: 36889 - protein, 7 aa, synthetic construct
HHKLGEN

SEQ ID NO: 36890 - protein, 7 aa, synthetic construct
VMSSQLW

SEQ ID NO: 36891 - protein, 7 aa, synthetic construct
FHKLSPV

SEQ ID NO: 36892 - protein, 7 aa, synthetic construct
VMSTNGR

SEQ ID NO: 36893 - protein, 7 aa, synthetic construct
ALESRTW

SEQ ID NO: 36894 - protein, 7 aa, synthetic construct
LHRAGPD

SEQ ID NO: 36895 - protein, 7 aa, synthetic construct
RMEDAYP

SEQ ID NO: 36896 - protein, 7 aa, synthetic construct
VGHKGWD

SEQ ID NO: 36897 - protein, 7 aa, synthetic construct
VSEFKVY

SEQ ID NO: 36898 - protein, 7 aa, synthetic construct
RGADVYP

SEQ ID NO: 36899 - protein, 7 aa, synthetic construct
LHKLQVD

SEQ ID NO: 36900 - protein, 7 aa, synthetic construct
YFTGHTD

SEQ ID NO: 36901 - protein, 7 aa, synthetic construct
YFTGKLD

SEQ ID NO: 36902 - protein, 7 aa, synthetic construct
EMASRDW

SEQ ID NO: 36903 - protein, 7 aa, synthetic construct
YVKSQQH

SEQ ID NO: 36904 - protein, 7 aa, synthetic construct
YFSKIKE

SEQ ID NO: 36905 - protein, 7 aa, synthetic construct
YFMGKIA

SEQ ID NO: 36906 - protein, 7 aa, synthetic construct
NMASAKW

SEQ ID NO: 36907 - protein, 7 aa, synthetic construct
YFTGKTE

SEQ ID NO: 36908 - protein, 7 aa, synthetic construct
REEMVRW

SEQ ID NO: 36909 - protein, 7 aa, synthetic construct
LSRAAPN

SEQ ID NO: 36910 - protein, 7 aa, synthetic construct
YFTGVME

SEQ ID NO: 36911 - protein, 7 aa, synthetic construct
VSSTNGR

SEQ ID NO: 36912 - protein, 7 aa, synthetic construct
RSEFLAF

SEQ ID NO: 36913 - protein, 7 aa, synthetic construct
VMSDRIW

SEQ ID NO: 36914 - protein, 7 aa, synthetic construct
PMGSAMW

SEQ ID NO: 36915 - protein, 7 aa, synthetic construct
KDDFHVW

SEQ ID NO: 36916 - protein, 7 aa, synthetic construct
KDDFCTF

SEQ ID NO: 36917 - protein, 7 aa, synthetic construct
IPSDRLW

SEQ ID NO: 36918 - protein, 7 aa, synthetic construct
IMTSRDW

SEQ ID NO: 36919 - protein, 7 aa, synthetic construct
REDFVTW

SEQ ID NO: 36920 - protein, 7 aa, synthetic construct
DLRSAAW

SEQ ID NO: 36921 - protein, 7 aa, synthetic construct
YFSGIQE

SEQ ID NO: 36922 - protein, 7 aa, synthetic construct
VASRGWD

SEQ ID NO: 36923 - protein, 7 aa, synthetic construct
YFTGKID

SEQ ID NO: 36924 - protein, 7 aa, synthetic construct
YLKSQIY

SEQ ID NO: 36925 - protein, 7 aa, synthetic construct
RSDFVAF

SEQ ID NO: 36926 - protein, 7 aa, synthetic construct
YFTGMKE

SEQ ID NO: 36927 - protein, 7 aa, synthetic construct
RGTDVFP

SEQ ID NO: 36928 - protein, 7 aa, synthetic construct
YVRSAPG

SEQ ID NO: 36929 - protein, 7 aa, synthetic construct
RLYDAIP

SEQ ID NO: 36930 - protein, 7 aa, synthetic construct
KMADRQW

SEQ ID NO: 36931 - protein, 7 aa, synthetic construct
RDEFHSY

SEQ ID NO: 36932 - protein, 7 aa, synthetic construct
YHKLNHN

SEQ ID NO: 36933 - protein, 7 aa, synthetic construct
LCRPCST

SEQ ID NO: 36934 - protein, 7 aa, synthetic construct
VGLEGRD

SEQ ID NO: 36935 - protein, 7 aa, synthetic construct
YFMGVKE

SEQ ID NO: 36936 - protein, 7 aa, synthetic construct
LCKPCLN

SEQ ID NO: 36937 - protein, 7 aa, synthetic construct
ILSDRNW

SEQ ID NO: 36938 - protein, 7 aa, synthetic construct
ILSSRDW

SEQ ID NO: 36939 - protein, 7 aa, synthetic construct
REDYVHW

SEQ ID NO: 36940 - protein, 7 aa, synthetic construct
RGDTVYP

SEQ ID NO: 36941 - protein, 7 aa, synthetic construct
YHKAGEN

SEQ ID NO: 36942 - protein, 7 aa, synthetic construct
RNDVVYP

SEQ ID NO: 36943 - protein, 7 aa, synthetic construct
YHAKQLN

SEQ ID NO: 36944 - protein, 7 aa, synthetic construct
IMSSSMW

SEQ ID NO: 36945 - protein, 7 aa, synthetic construct
REDGVKW

SEQ ID NO: 36946 - protein, 7 aa, synthetic construct
LCKPCGT

SEQ ID NO: 36947 - protein, 7 aa, synthetic construct
LHRLSMD

SEQ ID NO: 36948 - protein, 7 aa, synthetic construct
TKYGDPA

SEQ ID NO: 36949 - protein, 7 aa, synthetic construct
YFTGVIA

SEQ ID NO: 36950 - protein, 7 aa, synthetic construct
LARNGLN

SEQ ID NO: 36951 - protein, 7 aa, synthetic construct
RMADAFP

SEQ ID NO: 36952 - protein, 7 aa, synthetic construct
YFSGIID

SEQ ID NO: 36953 - protein, 7 aa, synthetic construct
GSEFISF

SEQ ID NO: 36954 - protein, 7 aa, synthetic construct
RMVDVFP

SEQ ID NO: 36955 - protein, 7 aa, synthetic construct
YSKLQPT

SEQ ID NO: 36956 - protein, 7 aa, synthetic construct
LHRLQVD

SEQ ID NO: 36957 - protein, 7 aa, synthetic construct
KDDYTTW

SEQ ID NO: 36958 - protein, 7 aa, synthetic construct
CKEKCRP

SEQ ID NO: 36959 - protein, 7 aa, synthetic construct
DHGKCGR

SEQ ID NO: 36960 - protein, 7 aa, synthetic construct
IMESRKW

SEQ ID NO: 36961 - protein, 7 aa, synthetic construct
YFTGIVD

SEQ ID NO: 36962 - protein, 7 aa, synthetic construct
YSKLDWN

SEQ ID NO: 36963 - protein, 7 aa, synthetic construct
PLQSRDW

SEQ ID NO: 36964 - protein, 7 aa, synthetic construct
RGEFVYP

SEQ ID NO: 36965 - protein, 7 aa, synthetic construct
LSRLNFD

SEQ ID NO: 36966 - protein, 7 aa, synthetic construct
RKQDVFP

SEQ ID NO: 36967 - protein, 7 aa, synthetic construct
KDDFHSY

SEQ ID NO: 36968 - protein, 7 aa, synthetic construct
RMPDAYP

SEQ ID NO: 36969 - protein, 7 aa, synthetic construct
YFTGHTA

SEQ ID NO: 36970 - protein, 7 aa, synthetic construct
PMESQKW

SEQ ID NO: 36971 - protein, 7 aa, synthetic construct
RDEFTSY

SEQ ID NO: 36972 - protein, 7 aa, synthetic construct
LHRLSPV

SEQ ID NO: 36973 - protein, 7 aa, synthetic construct
YWSGVLD

SEQ ID NO: 36974 - protein, 7 aa, synthetic construct
DAIRGWD

SEQ ID NO: 36975 - protein, 7 aa, synthetic construct
LHRLSTN

SEQ ID NO: 36976 - protein, 7 aa, synthetic construct
RTADAFP

SEQ ID NO: 36977 - protein, 7 aa, synthetic construct
RDEFHSF

SEQ ID NO: 36978 - protein, 7 aa, synthetic construct
IASRGWD

SEQ ID NO: 36979 - protein, 7 aa, synthetic construct
YFTGVSL

SEQ ID NO: 36980 - protein, 7 aa, synthetic construct
LHRLSDH

SEQ ID NO: 36981 - protein, 7 aa, synthetic construct
MRDGTSA

SEQ ID NO: 36982 - protein, 7 aa, synthetic construct
RDDFTVY

SEQ ID NO: 36983 - protein, 7 aa, synthetic construct
VSDFMAF

SEQ ID NO: 36984 - protein, 7 aa, synthetic construct
KDDFTGW

SEQ ID NO: 36985 - protein, 7 aa, synthetic construct
LHRLLPV

SEQ ID NO: 36986 - protein, 7 aa, synthetic construct
RMEDAFP

SEQ ID NO: 36987 - protein, 7 aa, synthetic construct
REETVFP

SEQ ID NO: 36988 - protein, 7 aa, synthetic construct
WFSGIKE

SEQ ID NO: 36989 - protein, 7 aa, synthetic construct
RDEHVFP

SEQ ID NO: 36990 - protein, 7 aa, synthetic construct
YLKSQSQ

SEQ ID NO: 36991 - protein, 7 aa, synthetic construct
LSRTSLN

SEQ ID NO: 36992 - protein, 7 aa, synthetic construct
YFTGQTA

SEQ ID NO: 36993 - protein, 7 aa, synthetic construct
YFTGTID

SEQ ID NO: 36994 - protein, 7 aa, synthetic construct
YLKSQTI

SEQ ID NO: 36995 - protein, 7 aa, synthetic construct
YFTGTVA

SEQ ID NO: 36996 - protein, 7 aa, synthetic construct
KDDYSIY

SEQ ID NO: 36997 - protein, 7 aa, synthetic construct
LTRLHQD

SEQ ID NO: 36998 - protein, 7 aa, synthetic construct
MMESSKW

SEQ ID NO: 36999 - protein, 7 aa, synthetic construct
GGEFSAW

SEQ ID NO: 37000 - protein, 7 aa, synthetic construct
LLTSSTW

SEQ ID NO: 37001 - protein, 7 aa, synthetic construct
RMESVMW

SEQ ID NO: 37002 - protein, 7 aa, synthetic construct
MLASSTW

SEQ ID NO: 37003 - protein, 7 aa, synthetic construct
YHKMSPV

SEQ ID NO: 37004 - protein, 7 aa, synthetic construct
DMASKDW

SEQ ID NO: 37005 - protein, 7 aa, synthetic construct
LARTAPD

SEQ ID NO: 37006 - protein, 7 aa, synthetic construct
YWSGILE

SEQ ID NO: 37007 - protein, 7 aa, synthetic construct
KDDYSVF

SEQ ID NO: 37008 - protein, 7 aa, synthetic construct
YSKVGRD

SEQ ID NO: 37009 - protein, 7 aa, synthetic construct
RDGTSAW

SEQ ID NO: 37010 - protein, 7 aa, synthetic construct
KGESRDW

SEQ ID NO: 37011 - protein, 7 aa, synthetic construct
KDEFMSY

SEQ ID NO: 37012 - protein, 7 aa, synthetic construct
YFTGRLE

SEQ ID NO: 37013 - protein, 7 aa, synthetic construct
LYSGEGP

SEQ ID NO: 37014 - protein, 7 aa, synthetic construct
ILSDRIW

SEQ ID NO: 37015 - protein, 7 aa, synthetic construct
NDGTSKW

SEQ ID NO: 37016 - protein, 7 aa, synthetic construct
FCKPCPG

SEQ ID NO: 37017 - protein, 7 aa, synthetic construct
LSRLSPL

SEQ ID NO: 37018 - protein, 7 aa, synthetic construct
VMESRVW

SEQ ID NO: 37019 - protein, 7 aa, synthetic construct
LHRLTAD

SEQ ID NO: 37020 - protein, 7 aa, synthetic construct
YSRLDPV

SEQ ID NO: 37021 - protein, 7 aa, synthetic construct
RGEEVFP

SEQ ID NO: 37022 - protein, 7 aa, synthetic construct
DMSARAW

SEQ ID NO: 37023 - protein, 7 aa, synthetic construct
VMNDAFP

SEQ ID NO: 37024 - protein, 7 aa, synthetic construct
LHRLSPM

SEQ ID NO: 37025 - protein, 7 aa, synthetic construct
YFTGKTD

SEQ ID NO: 37026 - protein, 7 aa, synthetic construct
YTRLDYN

SEQ ID NO: 37027 - protein, 7 aa, synthetic construct
YFSGTKE

SEQ ID NO: 37028 - protein, 7 aa, synthetic construct
YFTGYVD

SEQ ID NO: 37029 - protein, 7 aa, synthetic construct
RSEFVSY

SEQ ID NO: 37030 - protein, 7 aa, synthetic construct
LHRLSQD

SEQ ID NO: 37031 - protein, 7 aa, synthetic construct
LHRLSHD

SEQ ID NO: 37032 - protein, 7 aa, synthetic construct
MCKPCLT

SEQ ID NO: 37033 - protein, 7 aa, synthetic construct
LSRTSYD

SEQ ID NO: 37034 - protein, 7 aa, synthetic construct
YLKSQSD

SEQ ID NO: 37035 - protein, 7 aa, synthetic construct
LARTAYD

SEQ ID NO: 37036 - protein, 7 aa, synthetic construct
IMADRGW

SEQ ID NO: 37037 - protein, 7 aa, synthetic construct
LLSSASW

SEQ ID NO: 37038 - protein, 7 aa, synthetic construct
MLSSSTW

SEQ ID NO: 37039 - protein, 7 aa, synthetic construct
FHKLNEN

SEQ ID NO: 37040 - protein, 7 aa, synthetic construct
YFSGVTE

SEQ ID NO: 37041 - protein, 7 aa, synthetic construct
GGESSSW

SEQ ID NO: 37042 - protein, 7 aa, synthetic construct
WWSGITE

SEQ ID NO: 37043 - protein, 7 aa, synthetic construct
RDENVFP

SEQ ID NO: 37044 - protein, 7 aa, synthetic construct
VATRGWD

SEQ ID NO: 37045 - protein, 7 aa, synthetic construct
KDDYSTY

SEQ ID NO: 37046 - protein, 7 aa, synthetic construct
YLKSQSM

SEQ ID NO: 37047 - protein, 7 aa, synthetic construct
PMSSHGW

SEQ ID NO: 37048 - protein, 7 aa, synthetic construct
EMSSIKW

SEQ ID NO: 37049 - protein, 7 aa, synthetic construct
VMSSQSW

SEQ ID NO: 37050 - protein, 7 aa, synthetic construct
LHRLSIP

SEQ ID NO: 37051 - protein, 7 aa, synthetic construct
RLPTVFP

SEQ ID NO: 37052 - protein, 7 aa, synthetic construct
RLNDVYP

SEQ ID NO: 37053 - protein, 7 aa, synthetic construct
DLQSSTW

SEQ ID NO: 37054 - protein, 7 aa, synthetic construct
FHKKGPD

SEQ ID NO: 37055 - protein, 7 aa, synthetic construct
YVRIGPN

SEQ ID NO: 37056 - protein, 7 aa, synthetic construct
RMTDAYP

SEQ ID NO: 37057 - protein, 7 aa, synthetic construct
LYDGTNA

SEQ ID NO: 37058 - protein, 7 aa, synthetic construct
YWSGIIE

SEQ ID NO: 37059 - protein, 7 aa, synthetic construct
LTRLSPT

SEQ ID NO: 37060 - protein, 7 aa, synthetic construct
RTKEVYP

SEQ ID NO: 37061 - protein, 7 aa, synthetic construct
LSRISNN

SEQ ID NO: 37062 - protein, 7 aa, synthetic construct
LHRLSPN

SEQ ID NO: 37063 - protein, 7 aa, synthetic construct
LSRTSHN

SEQ ID NO: 37064 - protein, 7 aa, synthetic construct
YFTGKHE

SEQ ID NO: 37065 - protein, 7 aa, synthetic construct
PMESLKW

SEQ ID NO: 37066 - protein, 7 aa, synthetic construct
YLKSQAS

SEQ ID NO: 37067 - protein, 7 aa, synthetic construct
REDHVSW

SEQ ID NO: 37068 - protein, 7 aa, synthetic construct
YSRLNDD

SEQ ID NO: 37069 - protein, 7 aa, synthetic construct
RTVTVYP

SEQ ID NO: 37070 - protein, 7 aa, synthetic construct
VNDYVTY

SEQ ID NO: 37071 - protein, 7 aa, synthetic construct
RPNDCKT

SEQ ID NO: 37072 - protein, 7 aa, synthetic construct
TLSSQTW

SEQ ID NO: 37073 - protein, 7 aa, synthetic construct
LMSSAKW

SEQ ID NO: 37074 - protein, 7 aa, synthetic construct
ELQSSKW

SEQ ID NO: 37075 - protein, 7 aa, synthetic construct
LSRVSVN

SEQ ID NO: 37076 - protein, 7 aa, synthetic construct
HSRLGPD

SEQ ID NO: 37077 - protein, 7 aa, synthetic construct
RDEEVYP

SEQ ID NO: 37078 - protein, 7 aa, synthetic construct
YFAGRIA

SEQ ID NO: 37079 - protein, 7 aa, synthetic construct
KDDYTTY

SEQ ID NO: 37080 - protein, 7 aa, synthetic construct
YFTGVIP

SEQ ID NO: 37081 - protein, 7 aa, synthetic construct
LHRLSYD

SEQ ID NO: 37082 - protein, 7 aa, synthetic construct
YLKSQSS

SEQ ID NO: 37083 - protein, 7 aa, synthetic construct
YFTGQLE

SEQ ID NO: 37084 - protein, 7 aa, synthetic construct
DLTSREW

SEQ ID NO: 37085 - protein, 7 aa, synthetic construct
YFSGIQL

SEQ ID NO: 37086 - protein, 7 aa, synthetic construct
KSDFVTY

SEQ ID NO: 37087 - protein, 7 aa, synthetic construct
DLRASTW

SEQ ID NO: 37088 - protein, 7 aa, synthetic construct
REETVYW

SEQ ID NO: 37089 - protein, 7 aa, synthetic construct
YFSGKKE

SEQ ID NO: 37090 - protein, 7 aa, synthetic construct
YFTGITS

SEQ ID NO: 37091 - protein, 7 aa, synthetic construct
YLKSQSN

SEQ ID NO: 37092 - protein, 7 aa, synthetic construct
YFTGKAD

SEQ ID NO: 37093 - protein, 7 aa, synthetic construct
YFTGIQS

SEQ ID NO: 37094 - protein, 7 aa, synthetic construct
LDDYTTW

SEQ ID NO: 37095 - protein, 7 aa, synthetic construct
KDDYTVF

SEQ ID NO: 37096 - protein, 7 aa, synthetic construct
LHRLQLD

SEQ ID NO: 37097 - protein, 7 aa, synthetic construct
RLESANW

SEQ ID NO: 37098 - protein, 7 aa, synthetic construct
YFSGKIE

SEQ ID NO: 37099 - protein, 7 aa, synthetic construct
SDGCSKW

SEQ ID NO: 37100 - protein, 7 aa, synthetic construct
YFSGVKD

SEQ ID NO: 37101 - protein, 7 aa, synthetic construct
YFTGQTE

SEQ ID NO: 37102 - protein, 7 aa, synthetic construct
RTYDSFV

SEQ ID NO: 37103 - protein, 7 aa, synthetic construct
LCRPCGE

SEQ ID NO: 37104 - protein, 7 aa, synthetic construct
YTKLNPN

SEQ ID NO: 37105 - protein, 7 aa, synthetic construct
YFSKIVA

SEQ ID NO: 37106 - protein, 7 aa, synthetic construct
LHRLSED

SEQ ID NO: 37107 - protein, 7 aa, synthetic construct
VWSTNGR

SEQ ID NO: 37108 - protein, 7 aa, synthetic construct
VLSDRNW

SEQ ID NO: 37109 - protein, 7 aa, synthetic construct
RSEFVVY

SEQ ID NO: 37110 - protein, 7 aa, synthetic construct
YHKMMLN

SEQ ID NO: 37111 - protein, 7 aa, synthetic construct
DTYDSYP

SEQ ID NO: 37112 - protein, 7 aa, synthetic construct
YFAGKIA

SEQ ID NO: 37113 - protein, 7 aa, synthetic construct
KGESREW

SEQ ID NO: 37114 - protein, 7 aa, synthetic construct
KLQERTW

SEQ ID NO: 37115 - protein, 7 aa, synthetic construct
RDMEVYP

SEQ ID NO: 37116 - protein, 7 aa, synthetic construct
NDGSSKW

SEQ ID NO: 37117 - protein, 7 aa, synthetic construct
YFTGTVD

SEQ ID NO: 37118 - protein, 7 aa, synthetic construct
LHRLTED

SEQ ID NO: 37119 - protein, 7 aa, synthetic construct
RDDFVKW

SEQ ID NO: 37120 - protein, 7 aa, synthetic construct
RLSSQTW

SEQ ID NO: 37121 - protein, 7 aa, synthetic construct
RSEETYP

SEQ ID NO: 37122 - protein, 7 aa, synthetic construct
RTAQVYP

SEQ ID NO: 37123 - protein, 7 aa, synthetic construct
VKGSCEQ

SEQ ID NO: 37124 - protein, 7 aa, synthetic construct
RMSDAFP

SEQ ID NO: 37125 - protein, 7 aa, synthetic construct
PMGSSQW

SEQ ID NO: 37126 - protein, 7 aa, synthetic construct
YFTGQLD

SEQ ID NO: 37127 - protein, 7 aa, synthetic construct
REEYVTY

SEQ ID NO: 37128 - protein, 7 aa, synthetic construct
RTPTTYP

SEQ ID NO: 37129 - protein, 7 aa, synthetic construct
KDDYSTW

SEQ ID NO: 37130 - protein, 7 aa, synthetic construct
IGIKGWD

SEQ ID NO: 37131 - protein, 7 aa, synthetic construct
YHKLNVV

SEQ ID NO: 37132 - protein, 7 aa, synthetic construct
YTKSDNR

SEQ ID NO: 37133 - protein, 7 aa, synthetic construct
RMSDAYP

SEQ ID NO: 37134 - protein, 7 aa, synthetic construct
LCRPCLE

SEQ ID NO: 37135 - protein, 7 aa, synthetic construct
YFTGHIE

SEQ ID NO: 37136 - protein, 7 aa, synthetic construct
MDDYTMY

SEQ ID NO: 37137 - protein, 7 aa, synthetic construct
DLESRDW

SEQ ID NO: 37138 - protein, 7 aa, synthetic construct
KDEFVSF

SEQ ID NO: 37139 - protein, 7 aa, synthetic construct
DMESRVW

SEQ ID NO: 37140 - protein, 7 aa, synthetic construct
LSRVGRD

SEQ ID NO: 37141 - protein, 7 aa, synthetic construct
DLSSRDW

SEQ ID NO: 37142 - protein, 7 aa, synthetic construct
REDFTSW

SEQ ID NO: 37143 - protein, 7 aa, synthetic construct
ELESRSW

SEQ ID NO: 37144 - protein, 7 aa, synthetic construct
RSESVYP

SEQ ID NO: 37145 - protein, 7 aa, synthetic construct
DPASREW

SEQ ID NO: 37146 - protein, 7 aa, synthetic construct
KEDYLSW

SEQ ID NO: 37147 - protein, 7 aa, synthetic construct
YTRIGPD

SEQ ID NO: 37148 - protein, 7 aa, synthetic construct
DMASNRW

SEQ ID NO: 37149 - protein, 7 aa, synthetic construct
YVKSQQC

SEQ ID NO: 37150 - protein, 7 aa, synthetic construct
RLDDVYP

SEQ ID NO: 37151 - protein, 7 aa, synthetic construct
YFSKVKE

SEQ ID NO: 37152 - protein, 7 aa, synthetic construct
RDEFSPY

SEQ ID NO: 37153 - protein, 7 aa, synthetic construct
VMEARSW

SEQ ID NO: 37154 - protein, 7 aa, synthetic construct
REDGVTW

SEQ ID NO: 37155 - protein, 7 aa, synthetic construct
YVKIAPH

SEQ ID NO: 37156 - protein, 7 aa, synthetic construct
YHAKQIN

SEQ ID NO: 37157 - protein, 7 aa, synthetic construct
RMDDVYP

SEQ ID NO: 37158 - protein, 7 aa, synthetic construct
YLKSQSC

SEQ ID NO: 37159 - protein, 7 aa, synthetic construct
YSKLSTN

SEQ ID NO: 37160 - protein, 7 aa, synthetic construct
MDDYNPF

SEQ ID NO: 37161 - protein, 7 aa, synthetic construct
RLESQSW

SEQ ID NO: 37162 - protein, 7 aa, synthetic construct
YVKSQMS

SEQ ID NO: 37163 - protein, 7 aa, synthetic construct
RTLDAFP

SEQ ID NO: 37164 - protein, 7 aa, synthetic construct
DMASQQW

SEQ ID NO: 37165 - protein, 7 aa, synthetic construct
YFTGKQE

SEQ ID NO: 37166 - protein, 7 aa, synthetic construct
GGETSTW

SEQ ID NO: 37167 - protein, 7 aa, synthetic construct
DLLSRDW

SEQ ID NO: 37168 - protein, 7 aa, synthetic construct
RTFDVFP

SEQ ID NO: 37169 - protein, 7 aa, synthetic construct
YFTGVQA

SEQ ID NO: 37170 - protein, 7 aa, synthetic construct
YVKSDMA

SEQ ID NO: 37171 - protein, 7 aa, synthetic construct
LHRLQVS

SEQ ID NO: 37172 - protein, 7 aa, synthetic construct
LSKASTN

SEQ ID NO: 37173 - protein, 7 aa, synthetic construct
YHAQGPN

SEQ ID NO: 37174 - protein, 7 aa, synthetic construct
LHRLSSN

SEQ ID NO: 37175 - protein, 7 aa, synthetic construct
CAPDYRL

SEQ ID NO: 37176 - protein, 7 aa, synthetic construct
YFTGRVE

SEQ ID NO: 37177 - protein, 7 aa, synthetic construct
EGISRDW

SEQ ID NO: 37178 - protein, 7 aa, synthetic construct
IMSHATW

SEQ ID NO: 37179 - protein, 7 aa, synthetic construct
YVKSQPC

SEQ ID NO: 37180 - protein, 7 aa, synthetic construct
YFSGQVE

SEQ ID NO: 37181 - protein, 7 aa, synthetic construct
RTETTYP

SEQ ID NO: 37182 - protein, 7 aa, synthetic construct
RNESVYP

SEQ ID NO: 37183 - protein, 7 aa, synthetic construct
IMASRDW

SEQ ID NO: 37184 - protein, 7 aa, synthetic construct
RMESAVW

SEQ ID NO: 37185 - protein, 7 aa, synthetic construct
LHKLQVT

SEQ ID NO: 37186 - protein, 7 aa, synthetic construct
LHRLQST

SEQ ID NO: 37187 - protein, 7 aa, synthetic construct
LSRISPN

SEQ ID NO: 37188 - protein, 7 aa, synthetic construct
YVKSQLD

SEQ ID NO: 37189 - protein, 7 aa, synthetic construct
APGSIKW

SEQ ID NO: 37190 - protein, 7 aa, synthetic construct
YFAGRVE

SEQ ID NO: 37191 - protein, 7 aa, synthetic construct
YLKSQNY

SEQ ID NO: 37192 - protein, 7 aa, synthetic construct
YHALNID

SEQ ID NO: 37193 - protein, 7 aa, synthetic construct
YFSGKIA

SEQ ID NO: 37194 - protein, 7 aa, synthetic construct
LHRLSTS

SEQ ID NO: 37195 - protein, 7 aa, synthetic construct
IPRFCAP

SEQ ID NO: 37196 - protein, 7 aa, synthetic construct
KSDFVSY

SEQ ID NO: 37197 - protein, 7 aa, synthetic construct
RDEFSTY

SEQ ID NO: 37198 - protein, 7 aa, synthetic construct
YFTGTFD

SEQ ID NO: 37199 - protein, 7 aa, synthetic construct
DLESREW

SEQ ID NO: 37200 - protein, 7 aa, synthetic construct
RTPDAYP

SEQ ID NO: 37201 - protein, 7 aa, synthetic construct
REEQVRW

SEQ ID NO: 37202 - protein, 7 aa, synthetic construct
GSPGVGW

SEQ ID NO: 37203 - protein, 7 aa, synthetic construct
KDGYSTY

SEQ ID NO: 37204 - protein, 7 aa, synthetic construct
RGDNVYP

SEQ ID NO: 37205 - protein, 7 aa, synthetic construct
YTKSQPC

SEQ ID NO: 37206 - protein, 7 aa, synthetic construct
GGPSSSW

SEQ ID NO: 37207 - protein, 7 aa, synthetic construct
LLSSSNW

SEQ ID NO: 37208 - protein, 7 aa, synthetic construct
LHRLQAD

SEQ ID NO: 37209 - protein, 7 aa, synthetic construct
YLKSQAY

SEQ ID NO: 37210 - protein, 7 aa, synthetic construct
YVKSQKI

SEQ ID NO: 37211 - protein, 7 aa, synthetic construct
LMRDAFP

SEQ ID NO: 37212 - protein, 7 aa, synthetic construct
KSDYLTY

SEQ ID NO: 37213 - protein, 7 aa, synthetic construct
RDDFTSW

SEQ ID NO: 37214 - protein, 7 aa, synthetic construct
LHRLQSD

SEQ ID NO: 37215 - protein, 7 aa, synthetic construct
RNDTVYP

SEQ ID NO: 37216 - protein, 7 aa, synthetic construct
LSRIGRD

SEQ ID NO: 37217 - protein, 7 aa, synthetic construct
RKHDVYP

SEQ ID NO: 37218 - protein, 7 aa, synthetic construct
TDGTSRW

SEQ ID NO: 37219 - protein, 7 aa, synthetic construct
TRSTNGV

SEQ ID NO: 37220 - protein, 7 aa, synthetic construct
YWTGVVE

SEQ ID NO: 37221 - protein, 7 aa, synthetic construct
RMDSVKW

SEQ ID NO: 37222 - protein, 7 aa, synthetic construct
YTKSQQI

SEQ ID NO: 37223 - protein, 7 aa, synthetic construct
RNEDVYP

SEQ ID NO: 37224 - protein, 7 aa, synthetic construct
DLQSREW

SEQ ID NO: 37225 - protein, 7 aa, synthetic construct
YVRSDKL

SEQ ID NO: 37226 - protein, 7 aa, synthetic construct
HDGTSAW

SEQ ID NO: 37227 - protein, 7 aa, synthetic construct
YFTGSWD

SEQ ID NO: 37228 - protein, 7 aa, synthetic construct
REDFVRY

SEQ ID NO: 37229 - protein, 7 aa, synthetic construct
YFSGMKE

SEQ ID NO: 37230 - protein, 7 aa, synthetic construct
SMSSSTW

SEQ ID NO: 37231 - protein, 7 aa, synthetic construct
YFSGIVS

SEQ ID NO: 37232 - protein, 7 aa, synthetic construct
CLSKTGH

SEQ ID NO: 37233 - protein, 7 aa, synthetic construct
TDEFSTW

SEQ ID NO: 37234 - protein, 7 aa, synthetic construct
GSDYVAW

SEQ ID NO: 37235 - protein, 7 aa, synthetic construct
LSRVSPN

SEQ ID NO: 37236 - protein, 7 aa, synthetic construct
LSRASEN

SEQ ID NO: 37237 - protein, 7 aa, synthetic construct
FSRLNPD

SEQ ID NO: 37238 - protein, 7 aa, synthetic construct
RSEFVTF

SEQ ID NO: 37239 - protein, 7 aa, synthetic construct
RTDDAFP

SEQ ID NO: 37240 - protein, 7 aa, synthetic construct
YFTGMVE

SEQ ID NO: 37241 - protein, 7 aa, synthetic construct
YFSGHID

SEQ ID NO: 37242 - protein, 7 aa, synthetic construct
YHAKSLN

SEQ ID NO: 37243 - protein, 7 aa, synthetic construct
VGSTHGV

SEQ ID NO: 37244 - protein, 7 aa, synthetic construct
YWTGIQE

SEQ ID NO: 37245 - protein, 7 aa, synthetic construct
YFAGKVD

SEQ ID NO: 37246 - protein, 7 aa, synthetic construct
YFTGVAK

SEQ ID NO: 37247 - protein, 7 aa, synthetic construct
MHRLSAD

SEQ ID NO: 37248 - protein, 7 aa, synthetic construct
FHRLGPD

SEQ ID NO: 37249 - protein, 7 aa, synthetic construct
RDQTVYP

SEQ ID NO: 37250 - protein, 7 aa, synthetic construct
LCRPCKE

SEQ ID NO: 37251 - protein, 7 aa, synthetic construct
GSEFSRW

SEQ ID NO: 37252 - protein, 7 aa, synthetic construct
LSRISHN

SEQ ID NO: 37253 - protein, 7 aa, synthetic construct
YARTGLD

SEQ ID NO: 37254 - protein, 7 aa, synthetic construct
VESVNGV

SEQ ID NO: 37255 - protein, 7 aa, synthetic construct
YLKSQST

SEQ ID NO: 37256 - protein, 7 aa, synthetic construct
YTKSQSY

SEQ ID NO: 37257 - protein, 7 aa, synthetic construct
YLKSQVY

SEQ ID NO: 37258 - protein, 7 aa, synthetic construct
RLSDVYP

SEQ ID NO: 37259 - protein, 7 aa, synthetic construct
LHRLSDF

SEQ ID NO: 37260 - protein, 7 aa, synthetic construct
PRSTNGV

SEQ ID NO: 37261 - protein, 7 aa, synthetic construct
LSRASTN

SEQ ID NO: 37262 - protein, 7 aa, synthetic construct
VLSTNGR

SEQ ID NO: 37263 - protein, 7 aa, synthetic construct
YLKSQQY

SEQ ID NO: 37264 - protein, 7 aa, synthetic construct
LCRPCME

SEQ ID NO: 37265 - protein, 7 aa, synthetic construct
YFTGVTA

SEQ ID NO: 37266 - protein, 7 aa, synthetic construct
WWSGRIE

SEQ ID NO: 37267 - protein, 7 aa, synthetic construct
YSRVGVD

SEQ ID NO: 37268 - protein, 7 aa, synthetic construct
RESVSTW

SEQ ID NO: 37269 - protein, 7 aa, synthetic construct
LSRASPN

SEQ ID NO: 37270 - protein, 7 aa, synthetic construct
REEFVHW

SEQ ID NO: 37271 - protein, 7 aa, synthetic construct
YVRSDAN

SEQ ID NO: 37272 - protein, 7 aa, synthetic construct
DMTSHKW

SEQ ID NO: 37273 - protein, 7 aa, synthetic construct
IMEARDW

SEQ ID NO: 37274 - protein, 7 aa, synthetic construct
YFAGKIE

SEQ ID NO: 37275 - protein, 7 aa, synthetic construct
RDEFVSW

SEQ ID NO: 37276 - protein, 7 aa, synthetic construct
YFTGFKE

SEQ ID NO: 37277 - protein, 7 aa, synthetic construct
YVRSDKN

SEQ ID NO: 37278 - protein, 7 aa, synthetic construct
DLRSASW

SEQ ID NO: 37279 - protein, 7 aa, synthetic construct
YFTGIID

SEQ ID NO: 37280 - protein, 7 aa, synthetic construct
SDGTSRW

SEQ ID NO: 37281 - protein, 7 aa, synthetic construct
YVRSDLM

SEQ ID NO: 37282 - protein, 7 aa, synthetic construct
ESDFKIY

SEQ ID NO: 37283 - protein, 7 aa, synthetic construct
GGETSRW

SEQ ID NO: 37284 - protein, 7 aa, synthetic construct
RMESANW

SEQ ID NO: 37285 - protein, 7 aa, synthetic construct
RDETSSW

SEQ ID NO: 37286 - protein, 7 aa, synthetic construct
LCKPCYT

SEQ ID NO: 37287 - protein, 7 aa, synthetic construct
LTRAAPN

SEQ ID NO: 37288 - protein, 7 aa, synthetic construct
RDDFSSY

SEQ ID NO: 37289 - protein, 7 aa, synthetic construct
IMHARDW

SEQ ID NO: 37290 - protein, 7 aa, synthetic construct
ILESRGW

SEQ ID NO: 37291 - protein, 7 aa, synthetic construct
YPFPEPA

SEQ ID NO: 37292 - protein, 7 aa, synthetic construct
YFSGTVA

SEQ ID NO: 37293 - protein, 7 aa, synthetic construct
YFTGFRE

SEQ ID NO: 37294 - protein, 7 aa, synthetic construct
KDDYEYF

SEQ ID NO: 37295 - protein, 7 aa, synthetic construct
RDDFTVW

SEQ ID NO: 37296 - protein, 7 aa, synthetic construct
REETVYP

SEQ ID NO: 37297 - protein, 7 aa, synthetic construct
VMESRAW

SEQ ID NO: 37298 - protein, 7 aa, synthetic construct
RPESSRW

SEQ ID NO: 37299 - protein, 7 aa, synthetic construct
WWSGIRE

SEQ ID NO: 37300 - protein, 7 aa, synthetic construct
MHRLSPV

SEQ ID NO: 37301 - protein, 7 aa, synthetic construct
LRDGTNA

SEQ ID NO: 37302 - protein, 7 aa, synthetic construct
RLHDAYP

SEQ ID NO: 37303 - protein, 7 aa, synthetic construct
LCRPCPE

SEQ ID NO: 37304 - protein, 7 aa, synthetic construct
YFTGRTE

SEQ ID NO: 37305 - protein, 7 aa, synthetic construct
CRPPTRD

SEQ ID NO: 37306 - protein, 7 aa, synthetic construct
DMESRKW

SEQ ID NO: 37307 - protein, 7 aa, synthetic construct
VGLKGWD

SEQ ID NO: 37308 - protein, 7 aa, synthetic construct
YWSGIPM

SEQ ID NO: 37309 - protein, 7 aa, synthetic construct
ILSSREW

SEQ ID NO: 37310 - protein, 7 aa, synthetic construct
RDGTSSW

SEQ ID NO: 37311 - protein, 7 aa, synthetic construct
YFAGRIE

SEQ ID NO: 37312 - protein, 7 aa, synthetic construct
RDGVSRW

SEQ ID NO: 37313 - protein, 7 aa, synthetic construct
RTNDVYP

SEQ ID NO: 37314 - protein, 7 aa, synthetic construct
DLQSRSW

SEQ ID NO: 37315 - protein, 7 aa, synthetic construct
LCRPCSS

SEQ ID NO: 37316 - protein, 7 aa, synthetic construct
YFTGHME

SEQ ID NO: 37317 - protein, 7 aa, synthetic construct
CKEDSRI

SEQ ID NO: 37318 - protein, 7 aa, synthetic construct
IMSSRGW

SEQ ID NO: 37319 - protein, 7 aa, synthetic construct
VMSERTW

SEQ ID NO: 37320 - protein, 7 aa, synthetic construct
IAALGWD

SEQ ID NO: 37321 - protein, 7 aa, synthetic construct
RYEPVCP

SEQ ID NO: 37322 - protein, 7 aa, synthetic construct
KDEFRSF

SEQ ID NO: 37323 - protein, 7 aa, synthetic construct
RMESSQW

SEQ ID NO: 37324 - protein, 7 aa, synthetic construct
YSKAQGI

SEQ ID NO: 37325 - protein, 7 aa, synthetic construct
YFTGMHE

SEQ ID NO: 37326 - protein, 7 aa, synthetic construct
TDEFHAY

SEQ ID NO: 37327 - protein, 7 aa, synthetic construct
IESSRTW

SEQ ID NO: 37328 - protein, 7 aa, synthetic construct
RSEFETF

SEQ ID NO: 37329 - protein, 7 aa, synthetic construct
YVKSQNI

SEQ ID NO: 37330 - protein, 7 aa, synthetic construct
QMASRDW

SEQ ID NO: 37331 - protein, 7 aa, synthetic construct
PMADRKW

SEQ ID NO: 37332 - protein, 7 aa, synthetic construct
KDDYVSY

SEQ ID NO: 37333 - protein, 7 aa, synthetic construct
LMSGDGP

SEQ ID NO: 37334 - protein, 7 aa, synthetic construct
KLESSMW

SEQ ID NO: 37335 - protein, 7 aa, synthetic construct
VMSDRVW

SEQ ID NO: 37336 - protein, 7 aa, synthetic construct
REDFTAW

SEQ ID NO: 37337 - protein, 7 aa, synthetic construct
RTYDSIP

SEQ ID NO: 37338 - protein, 7 aa, synthetic construct
RDEYSSY

SEQ ID NO: 37339 - protein, 7 aa, synthetic construct
SMESHGW

SEQ ID NO: 37340 - protein, 7 aa, synthetic construct
NMASRDW

SEQ ID NO: 37341 - protein, 7 aa, synthetic construct
YFSGIHA

SEQ ID NO: 37342 - protein, 7 aa, synthetic construct
YFTGTTE

SEQ ID NO: 37343 - protein, 7 aa, synthetic construct
RMGDAYP

SEQ ID NO: 37344 - protein, 7 aa, synthetic construct
LHRMSID

SEQ ID NO: 37345 - protein, 7 aa, synthetic construct
YHKLDIN

SEQ ID NO: 37346 - protein, 7 aa, synthetic construct
REMTVFP

SEQ ID NO: 37347 - protein, 7 aa, synthetic construct
RNMDVYP

SEQ ID NO: 37348 - protein, 7 aa, synthetic construct
DMMSHKW

SEQ ID NO: 37349 - protein, 7 aa, synthetic construct
SDGVSRW

SEQ ID NO: 37350 - protein, 7 aa, synthetic construct
YHKLQSF

SEQ ID NO: 37351 - protein, 7 aa, synthetic construct
YFSGQKE

SEQ ID NO: 37352 - protein, 7 aa, synthetic construct
VLSDRSW

SEQ ID NO: 37353 - protein, 7 aa, synthetic construct
VMFDAYP

SEQ ID NO: 37354 - protein, 7 aa, synthetic construct
YLKSQEW

SEQ ID NO: 37355 - protein, 7 aa, synthetic construct
PMMSGTW

SEQ ID NO: 37356 - protein, 7 aa, synthetic construct
DLSSSDW

SEQ ID NO: 37357 - protein, 7 aa, synthetic construct
YFTGMRE

SEQ ID NO: 37358 - protein, 7 aa, synthetic construct
KDGTSYW

SEQ ID NO: 37359 - protein, 7 aa, synthetic construct
DMSSNKW

SEQ ID NO: 37360 - protein, 7 aa, synthetic construct
RGEGVYP

SEQ ID NO: 37361 - protein, 7 aa, synthetic construct
YFTGTLE

SEQ ID NO: 37362 - protein, 7 aa, synthetic construct
RTSDAYP

SEQ ID NO: 37363 - protein, 7 aa, synthetic construct
YVKSQQT

SEQ ID NO: 37364 - protein, 7 aa, synthetic construct
DFYGKYA

SEQ ID NO: 37365 - protein, 7 aa, synthetic construct
DMSSKVW

SEQ ID NO: 37366 - protein, 7 aa, synthetic construct
VMADRKW

SEQ ID NO: 37367 - protein, 7 aa, synthetic construct
YFTGKHD

SEQ ID NO: 37368 - protein, 7 aa, synthetic construct
LHRLSEF

SEQ ID NO: 37369 - protein, 7 aa, synthetic construct
FSVCTGS

SEQ ID NO: 37370 - protein, 7 aa, synthetic construct
RSADAYP

SEQ ID NO: 37371 - protein, 7 aa, synthetic construct
PMGSAQW

SEQ ID NO: 37372 - protein, 7 aa, synthetic construct
YLKSQDY

SEQ ID NO: 37373 - protein, 7 aa, synthetic construct
YFSGQIE

SEQ ID NO: 37374 - protein, 7 aa, synthetic construct
YVKSQAS

SEQ ID NO: 37375 - protein, 7 aa, synthetic construct
LHRLSDS

SEQ ID NO: 37376 - protein, 7 aa, synthetic construct
YWSAIKE

SEQ ID NO: 37377 - protein, 7 aa, synthetic construct
YFSGIPS

SEQ ID NO: 37378 - protein, 7 aa, synthetic construct
YSKLSSN

SEQ ID NO: 37379 - protein, 7 aa, synthetic construct
VAMEGRD

SEQ ID NO: 37380 - protein, 7 aa, synthetic construct
DDGSSRW

SEQ ID NO: 37381 - protein, 7 aa, synthetic construct
DMESRTW

SEQ ID NO: 37382 - protein, 7 aa, synthetic construct
FFTGIIE

SEQ ID NO: 37383 - protein, 7 aa, synthetic construct
RDSTVFP

SEQ ID NO: 37384 - protein, 7 aa, synthetic construct
GADHVKW

SEQ ID NO: 37385 - protein, 7 aa, synthetic construct
LHRIGAN

SEQ ID NO: 37386 - protein, 7 aa, synthetic construct
KDDYTLF

SEQ ID NO: 37387 - protein, 7 aa, synthetic construct
YSKLDYN

SEQ ID NO: 37388 - protein, 7 aa, synthetic construct
KCKPCPI

SEQ ID NO: 37389 - protein, 7 aa, synthetic construct
MHRLSPL

SEQ ID NO: 37390 - protein, 7 aa, synthetic construct
DLGSAKW

SEQ ID NO: 37391 - protein, 7 aa, synthetic construct
YYTGVKE

SEQ ID NO: 37392 - protein, 7 aa, synthetic construct
MRDGTPS

SEQ ID NO: 37393 - protein, 7 aa, synthetic construct
DMSSVQW

SEQ ID NO: 37394 - protein, 7 aa, synthetic construct
RDGMSAW

SEQ ID NO: 37395 - protein, 7 aa, synthetic construct
RLESSGW

SEQ ID NO: 37396 - protein, 7 aa, synthetic construct
YFSKVIA

SEQ ID NO: 37397 - protein, 7 aa, synthetic construct
YLKSQSF

SEQ ID NO: 37398 - protein, 7 aa, synthetic construct
GCGTKSG

SEQ ID NO: 37399 - protein, 7 aa, synthetic construct
KSEFKIF

SEQ ID NO: 37400 - protein, 7 aa, synthetic construct
YFSGTID

SEQ ID NO: 37401 - protein, 7 aa, synthetic construct
VMADRIW

SEQ ID NO: 37402 - protein, 7 aa, synthetic construct
RDMDVYP

SEQ ID NO: 37403 - protein, 7 aa, synthetic construct
YFSGRLE

SEQ ID NO: 37404 - protein, 7 aa, synthetic construct
REELVRW

SEQ ID NO: 37405 - protein, 7 aa, synthetic construct
YFTGYID

SEQ ID NO: 37406 - protein, 7 aa, synthetic construct
YFTGTVL

SEQ ID NO: 37407 - protein, 7 aa, synthetic construct
LSKVGYD

SEQ ID NO: 37408 - protein, 7 aa, synthetic construct
YFSGKID

SEQ ID NO: 37409 - protein, 7 aa, synthetic construct
VPDYVRY

SEQ ID NO: 37410 - protein, 7 aa, synthetic construct
RGDDHYP

SEQ ID NO: 37411 - protein, 7 aa, synthetic construct
LCRPCSQ

SEQ ID NO: 37412 - protein, 7 aa, synthetic construct
DMSVRTW

SEQ ID NO: 37413 - protein, 7 aa, synthetic construct
EMGSATW

SEQ ID NO: 37414 - protein, 7 aa, synthetic construct
RMESSMW

SEQ ID NO: 37415 - protein, 7 aa, synthetic construct
YVRSDLG

SEQ ID NO: 37416 - protein, 7 aa, synthetic construct
MKDGTNP

SEQ ID NO: 37417 - protein, 7 aa, synthetic construct
YFTGEVN

SEQ ID NO: 37418 - protein, 7 aa, synthetic construct
RSVSVFP

SEQ ID NO: 37419 - protein, 7 aa, synthetic construct
RNDHVFP

SEQ ID NO: 37420 - protein, 7 aa, synthetic construct
IMADRVW

SEQ ID NO: 37421 - protein, 7 aa, synthetic construct
YWSGVIE

SEQ ID NO: 37422 - protein, 7 aa, synthetic construct
YLKSQSL

SEQ ID NO: 37423 - protein, 7 aa, synthetic construct
RSEFMSY

SEQ ID NO: 37424 - protein, 7 aa, synthetic construct
LHRLSPG

SEQ ID NO: 37425 - protein, 7 aa, synthetic construct
IAGRGWD

SEQ ID NO: 37426 - protein, 7 aa, synthetic construct
IADHVRW

SEQ ID NO: 37427 - protein, 7 aa, synthetic construct
YLRSQSY

SEQ ID NO: 37428 - protein, 7 aa, synthetic construct
DLQSSKW

SEQ ID NO: 37429 - protein, 7 aa, synthetic construct
IMSDRVW

SEQ ID NO: 37430 - protein, 7 aa, synthetic construct
RGEFTYP

SEQ ID NO: 37431 - protein, 7 aa, synthetic construct
REPHVSW

SEQ ID NO: 37432 - protein, 7 aa, synthetic construct
FCKPCLT

SEQ ID NO: 37433 - protein, 7 aa, synthetic construct
CGTKCCP

SEQ ID NO: 37434 - protein, 7 aa, synthetic construct
YFTGIPD

SEQ ID NO: 37435 - protein, 7 aa, synthetic construct
YFSGKME

SEQ ID NO: 37436 - protein, 7 aa, synthetic construct
RSDFKIF

SEQ ID NO: 37437 - protein, 7 aa, synthetic construct
LLSDRTW

SEQ ID NO: 37438 - protein, 7 aa, synthetic construct
ILSARDW

SEQ ID NO: 37439 - protein, 7 aa, synthetic construct
DMESRGW

SEQ ID NO: 37440 - protein, 7 aa, synthetic construct
RNEFTPF

SEQ ID NO: 37441 - protein, 7 aa, synthetic construct
YFTGTMD

SEQ ID NO: 37442 - protein, 7 aa, synthetic construct
YHKASPI

SEQ ID NO: 37443 - protein, 7 aa, synthetic construct
CKPGGHW

SEQ ID NO: 37444 - protein, 7 aa, synthetic construct
ELQSSTW

SEQ ID NO: 37445 - protein, 7 aa, synthetic construct
RGGGLFP

SEQ ID NO: 37446 - protein, 7 aa, synthetic construct
LVDGLRW

SEQ ID NO: 37447 - protein, 7 aa, synthetic construct
YVRSGPN

SEQ ID NO: 37448 - protein, 7 aa, synthetic construct
VHSTNGR

SEQ ID NO: 37449 - protein, 7 aa, synthetic construct
YFTGFVE

SEQ ID NO: 37450 - protein, 7 aa, synthetic construct
YFTGINS

SEQ ID NO: 37451 - protein, 7 aa, synthetic construct
YFTGWPD

SEQ ID NO: 37452 - protein, 7 aa, synthetic construct
LHRLGDH

SEQ ID NO: 37453 - protein, 7 aa, synthetic construct
PMGQATW

SEQ ID NO: 37454 - protein, 7 aa, synthetic construct
RDEFSGY

SEQ ID NO: 37455 - protein, 7 aa, synthetic construct
GSPGVHW

SEQ ID NO: 37456 - protein, 7 aa, synthetic construct
DAFEGRD

SEQ ID NO: 37457 - protein, 7 aa, synthetic construct
KMDSIGW

SEQ ID NO: 37458 - protein, 7 aa, synthetic construct
VMSSRDW

SEQ ID NO: 37459 - protein, 7 aa, synthetic construct
YFTGVLE

SEQ ID NO: 37460 - protein, 7 aa, synthetic construct
QMESRMW

SEQ ID NO: 37461 - protein, 7 aa, synthetic construct
FFSGIKE

SEQ ID NO: 37462 - protein, 7 aa, synthetic construct
YKGSCEQ

SEQ ID NO: 37463 - protein, 7 aa, synthetic construct
IAKRGWD

SEQ ID NO: 37464 - protein, 7 aa, synthetic construct
YTRLDKD

SEQ ID NO: 37465 - protein, 7 aa, synthetic construct
LSRISQN

SEQ ID NO: 37466 - protein, 7 aa, synthetic construct
KDGYSAY

SEQ ID NO: 37467 - protein, 7 aa, synthetic construct
YSRLNVL

SEQ ID NO: 37468 - protein, 7 aa, synthetic construct
RDEFNHW

SEQ ID NO: 37469 - protein, 7 aa, synthetic construct
LTRLVNN

SEQ ID NO: 37470 - protein, 7 aa, synthetic construct
YFTGKLS

SEQ ID NO: 37471 - protein, 7 aa, synthetic construct
YFTGKPD

SEQ ID NO: 37472 - protein, 7 aa, synthetic construct
KDDYHTY

SEQ ID NO: 37473 - protein, 7 aa, synthetic construct
YFTGRTA

SEQ ID NO: 37474 - protein, 7 aa, synthetic construct
YFTGQHA

SEQ ID NO: 37475 - protein, 7 aa, synthetic construct
IMESRAW

SEQ ID NO: 37476 - protein, 7 aa, synthetic construct
RSEFLPF

SEQ ID NO: 37477 - protein, 7 aa, synthetic construct
DMGSSSW

SEQ ID NO: 37478 - protein, 7 aa, synthetic construct
YFTGKCE

SEQ ID NO: 37479 - protein, 7 aa, synthetic construct
LCRPGSE

SEQ ID NO: 37480 - protein, 7 aa, synthetic construct
LHRLVPD

SEQ ID NO: 37481 - protein, 7 aa, synthetic construct
YFTGRAE

SEQ ID NO: 37482 - protein, 7 aa, synthetic construct
YWSGVKE

SEQ ID NO: 37483 - protein, 7 aa, synthetic construct
MHRLGYD

SEQ ID NO: 37484 - protein, 7 aa, synthetic construct
LSRLGYD

SEQ ID NO: 37485 - protein, 7 aa, synthetic construct
CTSKYGH

SEQ ID NO: 37486 - protein, 7 aa, synthetic construct
YVKSDAG

SEQ ID NO: 37487 - protein, 7 aa, synthetic construct
NDGVSKW

SEQ ID NO: 37488 - protein, 7 aa, synthetic construct
YSRVGPD

SEQ ID NO: 37489 - protein, 7 aa, synthetic construct
YHAKQNN

SEQ ID NO: 37490 - protein, 7 aa, synthetic construct
YFSGIPA

SEQ ID NO: 37491 - protein, 7 aa, synthetic construct
SLESRKW

SEQ ID NO: 37492 - protein, 7 aa, synthetic construct
YWAGVKD

SEQ ID NO: 37493 - protein, 7 aa, synthetic construct
DDGVSRW

SEQ ID NO: 37494 - protein, 7 aa, synthetic construct
IMSSAMW

SEQ ID NO: 37495 - protein, 7 aa, synthetic construct
VMRDAYP

SEQ ID NO: 37496 - protein, 7 aa, synthetic construct
YSKLDHN

SEQ ID NO: 37497 - protein, 7 aa, synthetic construct
PMSSSGW

SEQ ID NO: 37498 - protein, 7 aa, synthetic construct
KDEYHTY

SEQ ID NO: 37499 - protein, 7 aa, synthetic construct
VPSSVRW

SEQ ID NO: 37500 - protein, 7 aa, synthetic construct
RVEDAYP

SEQ ID NO: 37501 - protein, 7 aa, synthetic construct
PMGDRKW

SEQ ID NO: 37502 - protein, 7 aa, synthetic construct
VFSTNGR

SEQ ID NO: 37503 - protein, 7 aa, synthetic construct
RDDHVYW

SEQ ID NO: 37504 - protein, 7 aa, synthetic construct
GGTTSCW

SEQ ID NO: 37505 - protein, 7 aa, synthetic construct
YFTGVVD

SEQ ID NO: 37506 - protein, 7 aa, synthetic construct
DLRAHDW

SEQ ID NO: 37507 - protein, 7 aa, synthetic construct
YFSGVMA

SEQ ID NO: 37508 - protein, 7 aa, synthetic construct
ICKPCLT

SEQ ID NO: 37509 - protein, 7 aa, synthetic construct
YFAGVKE

SEQ ID NO: 37510 - protein, 7 aa, synthetic construct
IMMDRGW

SEQ ID NO: 37511 - protein, 7 aa, synthetic construct
RREDVYP

SEQ ID NO: 37512 - protein, 7 aa, synthetic construct
YTRLDPV

SEQ ID NO: 37513 - protein, 7 aa, synthetic construct
GGEFSRW

SEQ ID NO: 37514 - protein, 7 aa, synthetic construct
SLESRSW

SEQ ID NO: 37515 - protein, 7 aa, synthetic construct
YFTGVQS

SEQ ID NO: 37516 - protein, 7 aa, synthetic construct
RNEFTTF

SEQ ID NO: 37517 - protein, 7 aa, synthetic construct
RTHDTFP

SEQ ID NO: 37518 - protein, 7 aa, synthetic construct
RLNDAYP

SEQ ID NO: 37519 - protein, 7 aa, synthetic construct
YHRLQPD

SEQ ID NO: 37520 - protein, 7 aa, synthetic construct
VMQSRDW

SEQ ID NO: 37521 - protein, 7 aa, synthetic construct
LCKPCLV

SEQ ID NO: 37522 - protein, 7 aa, synthetic construct
DMMSRDW

SEQ ID NO: 37523 - protein, 7 aa, synthetic construct
LSRLQEN

SEQ ID NO: 37524 - protein, 7 aa, synthetic construct
IMSDRGW

SEQ ID NO: 37525 - protein, 7 aa, synthetic construct
ELASHAW

SEQ ID NO: 37526 - protein, 7 aa, synthetic construct
YFTGTLA

SEQ ID NO: 37527 - protein, 7 aa, synthetic construct
LHRLQSH

SEQ ID NO: 37528 - protein, 7 aa, synthetic construct
AMADRTW

SEQ ID NO: 37529 - protein, 7 aa, synthetic construct
REESRSW

SEQ ID NO: 37530 - protein, 7 aa, synthetic construct
YLKSQTY

SEQ ID NO: 37531 - protein, 7 aa, synthetic construct
RGEEIYP

SEQ ID NO: 37532 - protein, 7 aa, synthetic construct
HDGTSKW

SEQ ID NO: 37533 - protein, 7 aa, synthetic construct
VESANGV

SEQ ID NO: 37534 - protein, 7 aa, synthetic construct
YFTGKIN

SEQ ID NO: 37535 - protein, 7 aa, synthetic construct
REFDAFP

SEQ ID NO: 37536 - protein, 7 aa, synthetic construct
RDEFTHY

SEQ ID NO: 37537 - protein, 7 aa, synthetic construct
GSEYSKW

SEQ ID NO: 37538 - protein, 7 aa, synthetic construct
WWSGVQS

SEQ ID NO: 37539 - protein, 7 aa, synthetic construct
YFHGKLE

SEQ ID NO: 37540 - protein, 7 aa, synthetic construct
LHRLHPN

SEQ ID NO: 37541 - protein, 7 aa, synthetic construct
RDEYTGF

SEQ ID NO: 37542 - protein, 7 aa, synthetic construct
YSRLGLD

SEQ ID NO: 37543 - protein, 7 aa, synthetic construct
NSEYLPF

SEQ ID NO: 37544 - protein, 7 aa, synthetic construct
YFTGRID

SEQ ID NO: 37545 - protein, 7 aa, synthetic construct
AGGGLFI

SEQ ID NO: 37546 - protein, 7 aa, synthetic construct
VPDHVRW

SEQ ID NO: 37547 - protein, 7 aa, synthetic construct
PLSSASW

SEQ ID NO: 37548 - protein, 7 aa, synthetic construct
YFTGEKE

SEQ ID NO: 37549 - protein, 7 aa, synthetic construct
CKPNNGI

SEQ ID NO: 37550 - protein, 7 aa, synthetic construct
LHKMMMN

SEQ ID NO: 37551 - protein, 7 aa, synthetic construct
LTRPCSE

SEQ ID NO: 37552 - protein, 7 aa, synthetic construct
YVRSDHN

SEQ ID NO: 37553 - protein, 7 aa, synthetic construct
RSEHTYP

SEQ ID NO: 37554 - protein, 7 aa, synthetic construct
YHKSNMN

SEQ ID NO: 37555 - protein, 7 aa, synthetic construct
MPTGDGP

SEQ ID NO: 37556 - protein, 7 aa, synthetic construct
IMSSREW

SEQ ID NO: 37557 - protein, 7 aa, synthetic construct
YFTGKRE

SEQ ID NO: 37558 - protein, 7 aa, synthetic construct
YFHGIHE

SEQ ID NO: 37559 - protein, 7 aa, synthetic construct
VMSSREW

SEQ ID NO: 37560 - protein, 7 aa, synthetic construct
YFTGHTE

SEQ ID NO: 37561 - protein, 7 aa, synthetic construct
DMASTNW

SEQ ID NO: 37562 - protein, 7 aa, synthetic construct
MHRLSTN

SEQ ID NO: 37563 - protein, 7 aa, synthetic construct
IGHEGWD

SEQ ID NO: 37564 - protein, 7 aa, synthetic construct
GCRPDPV

SEQ ID NO: 37565 - protein, 7 aa, synthetic construct
KDDYTSY

SEQ ID NO: 37566 - protein, 7 aa, synthetic construct
YSRLQPD

SEQ ID NO: 37567 - protein, 7 aa, synthetic construct
KDEFKSY

SEQ ID NO: 37568 - protein, 7 aa, synthetic construct
RDEFTSW

SEQ ID NO: 37569 - protein, 7 aa, synthetic construct
YFHGVKE

SEQ ID NO: 37570 - protein, 7 aa, synthetic construct
YTKSQEW

SEQ ID NO: 37571 - protein, 7 aa, synthetic construct
RDEFSSF

SEQ ID NO: 37572 - protein, 7 aa, synthetic construct
VLSSNTW

SEQ ID NO: 37573 - protein, 7 aa, synthetic construct
YVKSDPM

SEQ ID NO: 37574 - protein, 7 aa, synthetic construct
DMTSRDW

SEQ ID NO: 37575 - protein, 7 aa, synthetic construct
YFTGQRE

SEQ ID NO: 37576 - protein, 7 aa, synthetic construct
KDDYLSW

SEQ ID NO: 37577 - protein, 7 aa, synthetic construct
LDEWHGF

SEQ ID NO: 37578 - protein, 7 aa, synthetic construct
RDGVSKW

SEQ ID NO: 37579 - protein, 7 aa, synthetic construct
CAIDYRE

SEQ ID NO: 37580 - protein, 7 aa, synthetic construct
YSRLSPD

SEQ ID NO: 37581 - protein, 7 aa, synthetic construct
AMADRQW

SEQ ID NO: 37582 - protein, 7 aa, synthetic construct
YFTGMMD

SEQ ID NO: 37583 - protein, 7 aa, synthetic construct
YWSGIQE

SEQ ID NO: 37584 - protein, 7 aa, synthetic construct
YHRLSVD

SEQ ID NO: 37585 - protein, 7 aa, synthetic construct
VMGSSNW

SEQ ID NO: 37586 - protein, 7 aa, synthetic construct
LCRPCIE

SEQ ID NO: 37587 - protein, 7 aa, synthetic construct
GSDGVRW

SEQ ID NO: 37588 - protein, 7 aa, synthetic construct
YVRSDVK

SEQ ID NO: 37589 - protein, 7 aa, synthetic construct
RDEFKSW

SEQ ID NO: 37590 - protein, 7 aa, synthetic construct
YWAGVKE

SEQ ID NO: 37591 - protein, 7 aa, synthetic construct
KDDFSGW

SEQ ID NO: 37592 - protein, 7 aa, synthetic construct
MHRLSFD

SEQ ID NO: 37593 - protein, 7 aa, synthetic construct
DLSDRKW

SEQ ID NO: 37594 - protein, 7 aa, synthetic construct
DWIPKCP

SEQ ID NO: 37595 - protein, 7 aa, synthetic construct
RGGDVYP

SEQ ID NO: 37596 - protein, 7 aa, synthetic construct
FFSGVIA

SEQ ID NO: 37597 - protein, 7 aa, synthetic construct
RGELIFP

SEQ ID NO: 37598 - protein, 7 aa, synthetic construct
PMESREW

SEQ ID NO: 37599 - protein, 7 aa, synthetic construct
GEDHVRW

SEQ ID NO: 37600 - protein, 7 aa, synthetic construct
YSRVSPD

SEQ ID NO: 37601 - protein, 7 aa, synthetic construct
YFSGVIS

SEQ ID NO: 37602 - protein, 7 aa, synthetic construct
YWSGLLE

SEQ ID NO: 37603 - protein, 7 aa, synthetic construct
RDDSVFP

SEQ ID NO: 37604 - protein, 7 aa, synthetic construct
REEYTSW

SEQ ID NO: 37605 - protein, 7 aa, synthetic construct
YFSGIHD

SEQ ID NO: 37606 - protein, 7 aa, synthetic construct
VDEYLSW

SEQ ID NO: 37607 - protein, 7 aa, synthetic construct
YFSGKKD

SEQ ID NO: 37608 - protein, 7 aa, synthetic construct
YFTGIHD

SEQ ID NO: 37609 - protein, 7 aa, synthetic construct
YFAGIIA

SEQ ID NO: 37610 - protein, 7 aa, synthetic construct
LMADRTW

SEQ ID NO: 37611 - protein, 7 aa, synthetic construct
RGDHVYP

SEQ ID NO: 37612 - protein, 7 aa, synthetic construct
YFSGIPE

SEQ ID NO: 37613 - protein, 7 aa, synthetic construct
DLRTATW

SEQ ID NO: 37614 - protein, 7 aa, synthetic construct
RTSTVYP

SEQ ID NO: 37615 - protein, 7 aa, synthetic construct
YFSGIQD

SEQ ID NO: 37616 - protein, 7 aa, synthetic construct
SDGTSKW

SEQ ID NO: 37617 - protein, 7 aa, synthetic construct
HSRIGPN

SEQ ID NO: 37618 - protein, 7 aa, synthetic construct
KDDYTGF

SEQ ID NO: 37619 - protein, 7 aa, synthetic construct
VMADRLW

SEQ ID NO: 37620 - protein, 7 aa, synthetic construct
LSRISHD

SEQ ID NO: 37621 - protein, 7 aa, synthetic construct
REEVVRW

SEQ ID NO: 37622 - protein, 7 aa, synthetic construct
RMQDAYP

SEQ ID NO: 37623 - protein, 7 aa, synthetic construct
RMESQSW

SEQ ID NO: 37624 - protein, 7 aa, synthetic construct
MFDGTNP

SEQ ID NO: 37625 - protein, 7 aa, synthetic construct
DGSSRLW

SEQ ID NO: 37626 - protein, 7 aa, synthetic construct
QGEARTW

SEQ ID NO: 37627 - protein, 7 aa, synthetic construct
GCGTKHG

SEQ ID NO: 37628 - protein, 7 aa, synthetic construct
YFTGVID

SEQ ID NO: 37629 - protein, 7 aa, synthetic construct
GCRYGDI

SEQ ID NO: 37630 - protein, 7 aa, synthetic construct
YARTAPD

SEQ ID NO: 37631 - protein, 7 aa, synthetic construct
VNDYISY

SEQ ID NO: 37632 - protein, 7 aa, synthetic construct
PMESSQW

SEQ ID NO: 37633 - protein, 7 aa, synthetic construct
REDYTTW

SEQ ID NO: 37634 - protein, 7 aa, synthetic construct
RTIDSYA

SEQ ID NO: 37635 - protein, 7 aa, synthetic construct
VLTSAKW

SEQ ID NO: 37636 - protein, 7 aa, synthetic construct
KSDYVTY

SEQ ID NO: 37637 - protein, 7 aa, synthetic construct
YFAGKIS

SEQ ID NO: 37638 - protein, 7 aa, synthetic construct
YWTGVTE

SEQ ID NO: 37639 - protein, 7 aa, synthetic construct
YFTGYLD

SEQ ID NO: 37640 - protein, 7 aa, synthetic construct
CGPGCCP

SEQ ID NO: 37641 - protein, 7 aa, synthetic construct
RSEFTTY

SEQ ID NO: 37642 - protein, 7 aa, synthetic construct
RSEFKVF

SEQ ID NO: 37643 - protein, 7 aa, synthetic construct
RDDHVYP

SEQ ID NO: 37644 - protein, 7 aa, synthetic construct
YWAGIKD

SEQ ID NO: 37645 - protein, 7 aa, synthetic construct
YFTGMIE

SEQ ID NO: 37646 - protein, 7 aa, synthetic construct
YFSGVKM

SEQ ID NO: 37647 - protein, 7 aa, synthetic construct
KDDFSPW

SEQ ID NO: 37648 - protein, 7 aa, synthetic construct
YFTGKPN

SEQ ID NO: 37649 - protein, 7 aa, synthetic construct
YSRLNPD

SEQ ID NO: 37650 - protein, 7 aa, synthetic construct
KDEWSVY

SEQ ID NO: 37651 - protein, 7 aa, synthetic construct
YFTGVQL

SEQ ID NO: 37652 - protein, 7 aa, synthetic construct
REDYVKW

SEQ ID NO: 37653 - protein, 7 aa, synthetic construct
YSRLNED

SEQ ID NO: 37654 - protein, 7 aa, synthetic construct
WSTHCCA

SEQ ID NO: 37655 - protein, 7 aa, synthetic construct
YHRLLPD

SEQ ID NO: 37656 - protein, 7 aa, synthetic construct
WWSGIHE

SEQ ID NO: 37657 - protein, 7 aa, synthetic construct
EMESSIW

SEQ ID NO: 37658 - protein, 7 aa, synthetic construct
RSDFEYF

SEQ ID NO: 37659 - protein, 7 aa, synthetic construct
MHRLSVD

SEQ ID NO: 37660 - protein, 7 aa, synthetic construct
SHSTNGR

SEQ ID NO: 37661 - protein, 7 aa, synthetic construct
LHRMSPD

SEQ ID NO: 37662 - protein, 7 aa, synthetic construct
FFTGQVD

SEQ ID NO: 37663 - protein, 7 aa, synthetic construct
YVRSDML

SEQ ID NO: 37664 - protein, 7 aa, synthetic construct
EMESRVW

SEQ ID NO: 37665 - protein, 7 aa, synthetic construct
YWSGVQE

SEQ ID NO: 37666 - protein, 7 aa, synthetic construct
RSEFLSY

SEQ ID NO: 37667 - protein, 7 aa, synthetic construct
VMSQATW

SEQ ID NO: 37668 - protein, 7 aa, synthetic construct
FFTGQIE

SEQ ID NO: 37669 - protein, 7 aa, synthetic construct
QDGTSAW

SEQ ID NO: 37670 - protein, 7 aa, synthetic construct
YHRLQID

SEQ ID NO: 37671 - protein, 7 aa, synthetic construct
YVRSGPS

SEQ ID NO: 37672 - protein, 7 aa, synthetic construct
DLGSSTW

SEQ ID NO: 37673 - protein, 7 aa, synthetic construct
NYAKSLE

SEQ ID NO: 37674 - protein, 7 aa, synthetic construct
KDEFRSY

SEQ ID NO: 37675 - protein, 7 aa, synthetic construct
NMSSSSW

SEQ ID NO: 37676 - protein, 7 aa, synthetic construct
IDGRGWD

SEQ ID NO: 37677 - protein, 7 aa, synthetic construct
REDFVRW

SEQ ID NO: 37678 - protein, 7 aa, synthetic construct
YTRLSPD

SEQ ID NO: 37679 - protein, 7 aa, synthetic construct
DMESHKW

SEQ ID NO: 37680 - protein, 7 aa, synthetic construct
YFSKIRE

SEQ ID NO: 37681 - protein, 7 aa, synthetic construct
KDDYHSY

SEQ ID NO: 37682 - protein, 7 aa, synthetic construct
YLKSQSH

SEQ ID NO: 37683 - protein, 7 aa, synthetic construct
NSTHCCA

SEQ ID NO: 37684 - protein, 7 aa, synthetic construct
LCRPCSD

SEQ ID NO: 37685 - protein, 7 aa, synthetic construct
YFTGVRD

SEQ ID NO: 37686 - protein, 7 aa, synthetic construct
HCKPCLT

SEQ ID NO: 37687 - protein, 7 aa, synthetic construct
YWSGIQD

SEQ ID NO: 37688 - protein, 7 aa, synthetic construct
LARAGYN

SEQ ID NO: 37689 - protein, 7 aa, synthetic construct
YFTGVHQ

SEQ ID NO: 37690 - protein, 7 aa, synthetic construct
YFTGRMD

SEQ ID NO: 37691 - protein, 7 aa, synthetic construct
APDSVRW

SEQ ID NO: 37692 - protein, 7 aa, synthetic construct
YSRLAPD

SEQ ID NO: 37693 - protein, 7 aa, synthetic construct
RDEFTVY

SEQ ID NO: 37694 - protein, 7 aa, synthetic construct
REEEVYP

SEQ ID NO: 37695 - protein, 7 aa, synthetic construct
YFTGVAD

SEQ ID NO: 37696 - protein, 7 aa, synthetic construct
YLKSQMY

SEQ ID NO: 37697 - protein, 7 aa, synthetic construct
LCRPCVE

SEQ ID NO: 37698 - protein, 7 aa, synthetic construct
YFTGHPD

SEQ ID NO: 37699 - protein, 7 aa, synthetic construct
YFTGQIQ

SEQ ID NO: 37700 - protein, 7 aa, synthetic construct
YFSGVIG

SEQ ID NO: 37701 - protein, 7 aa, synthetic construct
YFTGIPE

SEQ ID NO: 37702 - protein, 7 aa, synthetic construct
RLESSAW

SEQ ID NO: 37703 - protein, 7 aa, synthetic construct
RDPTVFP

SEQ ID NO: 37704 - protein, 7 aa, synthetic construct
YVRSGPL

SEQ ID NO: 37705 - protein, 7 aa, synthetic construct
KDEFKVY

SEQ ID NO: 37706 - protein, 7 aa, synthetic construct
YFSGVKQ

SEQ ID NO: 37707 - protein, 7 aa, synthetic construct
RDDFHIY

SEQ ID NO: 37708 - protein, 7 aa, synthetic construct
SGESRLW

SEQ ID NO: 37709 - protein, 7 aa, synthetic construct
YVKSQTW

SEQ ID NO: 37710 - protein, 7 aa, synthetic construct
YFHGKIE

SEQ ID NO: 37711 - protein, 7 aa, synthetic construct
RTFDAFP

SEQ ID NO: 37712 - protein, 7 aa, synthetic construct
IMADRTW

SEQ ID NO: 37713 - protein, 7 aa, synthetic construct
YESTNGK

SEQ ID NO: 37714 - protein, 7 aa, synthetic construct
CAPDYEE

SEQ ID NO: 37715 - protein, 7 aa, synthetic construct
RGEHTYP

SEQ ID NO: 37716 - protein, 7 aa, synthetic construct
VLSDRAW

SEQ ID NO: 37717 - protein, 7 aa, synthetic construct
VMSSRSW

SEQ ID NO: 37718 - protein, 7 aa, synthetic construct
VMSDRLW

SEQ ID NO: 37719 - protein, 7 aa, synthetic construct
KDDFVTW

SEQ ID NO: 37720 - protein, 7 aa, synthetic construct
YFTGQLA

SEQ ID NO: 37721 - protein, 7 aa, synthetic construct
YFSLKVE

SEQ ID NO: 37722 - protein, 7 aa, synthetic construct
YFAGVKS

SEQ ID NO: 37723 - protein, 7 aa, synthetic construct
YTRIGPN

SEQ ID NO: 37724 - protein, 7 aa, synthetic construct
RGEYTFP

SEQ ID NO: 37725 - protein, 7 aa, synthetic construct
LWDGTGP

SEQ ID NO: 37726 - protein, 7 aa, synthetic construct
WLKSQIG

SEQ ID NO: 37727 - protein, 7 aa, synthetic construct
LSRIALN

SEQ ID NO: 37728 - protein, 7 aa, synthetic construct
LSRIAHN

SEQ ID NO: 37729 - protein, 7 aa, synthetic construct
YTRLNDN

SEQ ID NO: 37730 - protein, 7 aa, synthetic construct
LARTGID

SEQ ID NO: 37731 - protein, 7 aa, synthetic construct
YFTGKAN

SEQ ID NO: 37732 - protein, 7 aa, synthetic construct
YARTGPG

SEQ ID NO: 37733 - protein, 7 aa, synthetic construct
YVRSNPG

SEQ ID NO: 37734 - protein, 7 aa, synthetic construct
LCRPCEE

SEQ ID NO: 37735 - protein, 7 aa, synthetic construct
AFECTPG

SEQ ID NO: 37736 - protein, 7 aa, synthetic construct
VMSDRTW

SEQ ID NO: 37737 - protein, 7 aa, synthetic construct
YFTGKQD

SEQ ID NO: 37738 - protein, 7 aa, synthetic construct
DLLSAKW

SEQ ID NO: 37739 - protein, 7 aa, synthetic construct
YFTGVMD

SEQ ID NO: 37740 - protein, 7 aa, synthetic construct
APESVRW

SEQ ID NO: 37741 - protein, 7 aa, synthetic construct
QGESRLW

SEQ ID NO: 37742 - protein, 7 aa, synthetic construct
RNMDAYP

SEQ ID NO: 37743 - protein, 7 aa, synthetic construct
YCKPCLT

SEQ ID NO: 37744 - protein, 7 aa, synthetic construct
KSEFKTY

SEQ ID NO: 37745 - protein, 7 aa, synthetic construct
VESTNGW

SEQ ID NO: 37746 - protein, 7 aa, synthetic construct
RDEFSSW

SEQ ID NO: 37747 - protein, 7 aa, synthetic construct
RTSTHGI

SEQ ID NO: 37748 - protein, 7 aa, synthetic construct
CKGSTEQ

SEQ ID NO: 37749 - protein, 7 aa, synthetic construct
YLKSQSG

SEQ ID NO: 37750 - protein, 7 aa, synthetic construct
LCRPCSN

SEQ ID NO: 37751 - protein, 7 aa, synthetic construct
LCRPCSP

SEQ ID NO: 37752 - protein, 7 aa, synthetic construct
KDSFTAW

SEQ ID NO: 37753 - protein, 7 aa, synthetic construct
QDGTSYW

SEQ ID NO: 37754 - protein, 7 aa, synthetic construct
LHRLSTG

SEQ ID NO: 37755 - protein, 7 aa, synthetic construct
RPEARSW

SEQ ID NO: 37756 - protein, 7 aa, synthetic construct
IRSTNGV

SEQ ID NO: 37757 - protein, 7 aa, synthetic construct
YFSGRKE

SEQ ID NO: 37758 - protein, 7 aa, synthetic construct
DGATSRW

SEQ ID NO: 37759 - protein, 7 aa, synthetic construct
LCRPCLT

SEQ ID NO: 37760 - protein, 7 aa, synthetic construct
YFTGIPA

SEQ ID NO: 37761 - protein, 7 aa, synthetic construct
YWSGVSE

SEQ ID NO: 37762 - protein, 7 aa, synthetic construct
LCRPCNE

SEQ ID NO: 37763 - protein, 7 aa, synthetic construct
MSDFKIF

SEQ ID NO: 37764 - protein, 7 aa, synthetic construct
RSEFATW

SEQ ID NO: 37765 - protein, 7 aa, synthetic construct
LSRISPD

SEQ ID NO: 37766 - protein, 7 aa, synthetic construct
NMADRTW

SEQ ID NO: 37767 - protein, 7 aa, synthetic construct
YFTGIQG

SEQ ID NO: 37768 - protein, 7 aa, synthetic construct
CMPGVPL

SEQ ID NO: 37769 - protein, 7 aa, synthetic construct
YFTGVAQ

SEQ ID NO: 37770 - protein, 7 aa, synthetic construct
RSEFMPY

SEQ ID NO: 37771 - protein, 7 aa, synthetic construct
GGESSTW

SEQ ID NO: 37772 - protein, 7 aa, synthetic construct
LLQSATW

SEQ ID NO: 37773 - protein, 7 aa, synthetic construct
YVKSQAC

SEQ ID NO: 37774 - protein, 7 aa, synthetic construct
WTGTSCL

SEQ ID NO: 37775 - protein, 7 aa, synthetic construct
YFTGMFE

SEQ ID NO: 37776 - protein, 7 aa, synthetic construct
YFTGVKG

SEQ ID NO: 37777 - protein, 7 aa, synthetic construct
RDEFVGY

SEQ ID NO: 37778 - protein, 7 aa, synthetic construct
NMSDRGW

SEQ ID NO: 37779 - protein, 7 aa, synthetic construct
YFSGIIQ

SEQ ID NO: 37780 - protein, 7 aa, synthetic construct
YWTGVVD

SEQ ID NO: 37781 - protein, 7 aa, synthetic construct
RTSTHGV

SEQ ID NO: 37782 - protein, 7 aa, synthetic construct
AGPSRGW

SEQ ID NO: 37783 - protein, 7 aa, synthetic construct
YHAKGPS

SEQ ID NO: 37784 - protein, 7 aa, synthetic construct
LSRIATN

SEQ ID NO: 37785 - protein, 7 aa, synthetic construct
YFSGIPD

SEQ ID NO: 37786 - protein, 7 aa, synthetic construct
FAKSGCG

SEQ ID NO: 37787 - protein, 7 aa, synthetic construct
CKPEAPG

SEQ ID NO: 37788 - protein, 7 aa, synthetic construct
YFHGKIA

SEQ ID NO: 37789 - protein, 7 aa, synthetic construct
CKTTKCC

SEQ ID NO: 37790 - protein, 7 aa, synthetic construct
LCRPCQE

SEQ ID NO: 37791 - protein, 7 aa, synthetic construct
WFSGILE

SEQ ID NO: 37792 - protein, 7 aa, synthetic construct
FFSGIIE

SEQ ID NO: 37793 - protein, 7 aa, synthetic construct
KNDFVTY

SEQ ID NO: 37794 - protein, 7 aa, synthetic construct
YSKLDSN

SEQ ID NO: 37795 - protein, 7 aa, synthetic construct
YFSGKHE

SEQ ID NO: 37796 - protein, 7 aa, synthetic construct
CFDGRSA

SEQ ID NO: 37797 - protein, 7 aa, synthetic construct
LAKTSCN

SEQ ID NO: 37798 - protein, 7 aa, synthetic construct
YFTGYVE

SEQ ID NO: 37799 - protein, 7 aa, synthetic construct
YFTGQIV

SEQ ID NO: 37800 - protein, 7 aa, synthetic construct
RSSDVYP

SEQ ID NO: 37801 - protein, 7 aa, synthetic construct
RMEEVYP

SEQ ID NO: 37802 - protein, 7 aa, synthetic construct
YWSGVTA

SEQ ID NO: 37803 - protein, 7 aa, synthetic construct
YVRSQPG

SEQ ID NO: 37804 - protein, 7 aa, synthetic construct
CTSKNGH

SEQ ID NO: 37805 - protein, 7 aa, synthetic construct
VGGKCPG

SEQ ID NO: 37806 - protein, 7 aa, synthetic construct
RTYDSFP

SEQ ID NO: 37807 - protein, 7 aa, synthetic construct
LHRLSPS

SEQ ID NO: 37808 - protein, 7 aa, synthetic construct
DMTSSSW

SEQ ID NO: 37809 - protein, 7 aa, synthetic construct
YHRLSDD

SEQ ID NO: 37810 - protein, 7 aa, synthetic construct
YSRLQPL

SEQ ID NO: 37811 - protein, 7 aa, synthetic construct
YFSGKQE

SEQ ID NO: 37812 - protein, 7 aa, synthetic construct
MKDGTNA

SEQ ID NO: 37813 - protein, 7 aa, synthetic construct
FFDGTSA

SEQ ID NO: 37814 - protein, 7 aa, synthetic construct
YHKHQTN

SEQ ID NO: 37815 - protein, 7 aa, synthetic construct
GGDYSSW

SEQ ID NO: 37816 - protein, 7 aa, synthetic construct
YFTGIQD

SEQ ID NO: 37817 - protein, 7 aa, synthetic construct
RMESQGW

SEQ ID NO: 37818 - protein, 7 aa, synthetic construct
LCRPCSG

SEQ ID NO: 37819 - protein, 7 aa, synthetic construct
RSVDAYP

SEQ ID NO: 37820 - protein, 7 aa, synthetic construct
YVRSDHG

SEQ ID NO: 37821 - protein, 7 aa, synthetic construct
LCRPCTE

SEQ ID NO: 37822 - protein, 7 aa, synthetic construct
LSRISMN

SEQ ID NO: 37823 - protein, 7 aa, synthetic construct
IMADRAW

SEQ ID NO: 37824 - protein, 7 aa, synthetic construct
YSRVGEN

SEQ ID NO: 37825 - protein, 7 aa, synthetic construct
YFAGVCP

SEQ ID NO: 37826 - protein, 7 aa, synthetic construct
YFAGVRE

SEQ ID NO: 37827 - protein, 7 aa, synthetic construct
REDFVSY

SEQ ID NO: 37828 - protein, 7 aa, synthetic construct
FFTGRVE

SEQ ID NO: 37829 - protein, 7 aa, synthetic construct
LTRISRD

SEQ ID NO: 37830 - protein, 7 aa, synthetic construct
LHRLSTH

SEQ ID NO: 37831 - protein, 7 aa, synthetic construct
YSRLQDN

SEQ ID NO: 37832 - protein, 7 aa, synthetic construct
FFTGKIA

SEQ ID NO: 37833 - protein, 7 aa, synthetic construct
KGDSRSW

SEQ ID NO: 37834 - protein, 7 aa, synthetic construct
YYTGKKE

SEQ ID NO: 37835 - protein, 7 aa, synthetic construct
YFSGQME

SEQ ID NO: 37836 - protein, 7 aa, synthetic construct
YFSGMVA

SEQ ID NO: 37837 - protein, 7 aa, synthetic construct
YFSGVSQ

SEQ ID NO: 37838 - protein, 7 aa, synthetic construct
RDGTSHW

SEQ ID NO: 37839 - protein, 7 aa, synthetic construct
PYAKSRD

SEQ ID NO: 37840 - protein, 7 aa, synthetic construct
YHAKGVN

SEQ ID NO: 37841 - protein, 7 aa, synthetic construct
YFSGEKE

SEQ ID NO: 37842 - protein, 7 aa, synthetic construct
ELESREW

SEQ ID NO: 37843 - protein, 7 aa, synthetic construct
RDEFCTR

SEQ ID NO: 37844 - protein, 7 aa, synthetic construct
KSEYSTY

SEQ ID NO: 37845 - protein, 7 aa, synthetic construct
YWTGTVA

SEQ ID NO: 37846 - protein, 7 aa, synthetic construct
RDGASSW

SEQ ID NO: 37847 - protein, 7 aa, synthetic construct
RGDEVYP

SEQ ID NO: 37848 - protein, 7 aa, synthetic construct
NDGNSKW

SEQ ID NO: 37849 - protein, 7 aa, synthetic construct
YFSGKIM

SEQ ID NO: 37850 - protein, 7 aa, synthetic construct
RDGSSAW

SEQ ID NO: 37851 - protein, 7 aa, synthetic construct
YVKGDTR

SEQ ID NO: 37852 - protein, 7 aa, synthetic construct
RVMDAYA

SEQ ID NO: 37853 - protein, 7 aa, synthetic construct
YFSGTIN

SEQ ID NO: 37854 - protein, 7 aa, synthetic construct
YVRSDTK

SEQ ID NO: 37855 - protein, 7 aa, synthetic construct
YFTGQMD

SEQ ID NO: 37856 - protein, 7 aa, synthetic construct
YFSGVVR

SEQ ID NO: 37857 - protein, 7 aa, synthetic construct
REEFTAW

SEQ ID NO: 37858 - protein, 7 aa, synthetic construct
GGIGSNW

SEQ ID NO: 37859 - protein, 7 aa, synthetic construct
YSKLDSR

SEQ ID NO: 37860 - protein, 7 aa, synthetic construct
WWSGMVE

SEQ ID NO: 37861 - protein, 7 aa, synthetic construct
LSRLNMD

SEQ ID NO: 37862 - protein, 7 aa, synthetic construct
FHRLSPD

SEQ ID NO: 37863 - protein, 7 aa, synthetic construct
YSRLNLD

SEQ ID NO: 37864 - protein, 7 aa, synthetic construct
FFTGVRE

SEQ ID NO: 37865 - protein, 7 aa, synthetic construct
YFTGQTD

SEQ ID NO: 37866 - protein, 7 aa, synthetic construct
YLKSQHY

SEQ ID NO: 37867 - protein, 7 aa, synthetic construct
VMESTRW

SEQ ID NO: 37868 - protein, 7 aa, synthetic construct
YFSGTKL

SEQ ID NO: 37869 - protein, 7 aa, synthetic construct
GGETSHW

SEQ ID NO: 37870 - protein, 7 aa, synthetic construct
RESEVRW

SEQ ID NO: 37871 - protein, 7 aa, synthetic construct
RLEDRLW

SEQ ID NO: 37872 - protein, 7 aa, synthetic construct
YFAGKVA

SEQ ID NO: 37873 - protein, 7 aa, synthetic construct
YFSGQTA

SEQ ID NO: 37874 - protein, 7 aa, synthetic construct
VGHRGWD

SEQ ID NO: 37875 - protein, 7 aa, synthetic construct
FHRLSID

SEQ ID NO: 37876 - protein, 7 aa, synthetic construct
YWSGVKD

SEQ ID NO: 37877 - protein, 7 aa, synthetic construct
CKPDAIR

SEQ ID NO: 37878 - protein, 7 aa, synthetic construct
VNDFVTY

SEQ ID NO: 37879 - protein, 7 aa, synthetic construct
IMSGRTW

SEQ ID NO: 37880 - protein, 7 aa, synthetic construct
YWTGVSE

SEQ ID NO: 37881 - protein, 7 aa, synthetic construct
YFSGKVS

SEQ ID NO: 37882 - protein, 7 aa, synthetic construct
YHRLSIH

SEQ ID NO: 37883 - protein, 7 aa, synthetic construct
FFSGVLE

SEQ ID NO: 37884 - protein, 7 aa, synthetic construct
INSTNGR

SEQ ID NO: 37885 - protein, 7 aa, synthetic construct
YVRSDVG

SEQ ID NO: 37886 - protein, 7 aa, synthetic construct
EKKFNPF

SEQ ID NO: 37887 - protein, 7 aa, synthetic construct
YFTGHHD

SEQ ID NO: 37888 - protein, 7 aa, synthetic construct
YFTGMIS

SEQ ID NO: 37889 - protein, 7 aa, synthetic construct
YHKSGDN

SEQ ID NO: 37890 - protein, 7 aa, synthetic construct
YYTGRVE

SEQ ID NO: 37891 - protein, 7 aa, synthetic construct
CAPDYRS

SEQ ID NO: 37892 - protein, 7 aa, synthetic construct
VMSDRHW

SEQ ID NO: 37893 - protein, 7 aa, synthetic construct
YHAKGEN

SEQ ID NO: 37894 - protein, 7 aa, synthetic construct
YYTGIIA

SEQ ID NO: 37895 - protein, 7 aa, synthetic construct
YHRLSIP

SEQ ID NO: 37896 - protein, 7 aa, synthetic construct
KDDYSAY

SEQ ID NO: 37897 - protein, 7 aa, synthetic construct
KDDFLSW

SEQ ID NO: 37898 - protein, 7 aa, synthetic construct
KDGFSHY

SEQ ID NO: 37899 - protein, 7 aa, synthetic construct
YWSGIQL

SEQ ID NO: 37900 - protein, 7 aa, synthetic construct
RMEDRIW

SEQ ID NO: 37901 - protein, 7 aa, synthetic construct
YFSGVID

SEQ ID NO: 37902 - protein, 7 aa, synthetic construct
GGEYSKW

SEQ ID NO: 37903 - protein, 7 aa, synthetic construct
GAEHVRW

SEQ ID NO: 37904 - protein, 7 aa, synthetic construct
LHRVGQN

SEQ ID NO: 37905 - protein, 7 aa, synthetic construct
NSLEGRN

SEQ ID NO: 37906 - protein, 7 aa, synthetic construct
YWSGVVA

SEQ ID NO: 37907 - protein, 7 aa, synthetic construct
VPESVRW

SEQ ID NO: 37908 - protein, 7 aa, synthetic construct
RDVSVFP

SEQ ID NO: 37909 - protein, 7 aa, synthetic construct
YFTGQSD

SEQ ID NO: 37910 - protein, 7 aa, synthetic construct
YSRVGGG

SEQ ID NO: 37911 - protein, 7 aa, synthetic construct
LARIGWD

SEQ ID NO: 37912 - protein, 7 aa, synthetic construct
RTHDVYP

SEQ ID NO: 37913 - protein, 7 aa, synthetic construct
CKPLERP

SEQ ID NO: 37914 - protein, 7 aa, synthetic construct
RDGFSSY

SEQ ID NO: 37915 - protein, 7 aa, synthetic construct
LSRVSVD

SEQ ID NO: 37916 - protein, 7 aa, synthetic construct
YFTGIHV

SEQ ID NO: 37917 - protein, 7 aa, synthetic construct
YFAGKRE

SEQ ID NO: 37918 - protein, 7 aa, synthetic construct
CTSLTGH

SEQ ID NO: 37919 - protein, 7 aa, synthetic construct
YFTGFME

SEQ ID NO: 37920 - protein, 7 aa, synthetic construct
RDEFVSF

SEQ ID NO: 37921 - protein, 7 aa, synthetic construct
WVKSDTH

SEQ ID NO: 37922 - protein, 7 aa, synthetic construct
YFTGKNE

SEQ ID NO: 37923 - protein, 7 aa, synthetic construct
YSKVGHD

SEQ ID NO: 37924 - protein, 7 aa, synthetic construct
GSPGVRW

SEQ ID NO: 37925 - protein, 7 aa, synthetic construct
REDHVFW

SEQ ID NO: 37926 - protein, 7 aa, synthetic construct
YFSGVIP

SEQ ID NO: 37927 - protein, 7 aa, synthetic construct
QDGTSKW

SEQ ID NO: 37928 - protein, 7 aa, synthetic construct
LARGGYD

SEQ ID NO: 37929 - protein, 7 aa, synthetic construct
RDGTSMW

SEQ ID NO: 37930 - protein, 7 aa, synthetic construct
YWSGIKD

SEQ ID NO: 37931 - protein, 7 aa, synthetic construct
GGDGVRW

SEQ ID NO: 37932 - protein, 7 aa, synthetic construct
RENTVYW

SEQ ID NO: 37933 - protein, 7 aa, synthetic construct
VMSDRAW

SEQ ID NO: 37934 - protein, 7 aa, synthetic construct
RMESVSW

SEQ ID NO: 37935 - protein, 7 aa, synthetic construct
YVRSQTD

SEQ ID NO: 37936 - protein, 7 aa, synthetic construct
FFTGKID

SEQ ID NO: 37937 - protein, 7 aa, synthetic construct
INGRGWD

SEQ ID NO: 37938 - protein, 7 aa, synthetic construct
RTYDSYP

SEQ ID NO: 37939 - protein, 7 aa, synthetic construct
RNEFTTY

SEQ ID NO: 37940 - protein, 7 aa, synthetic construct
EMTSHMW

SEQ ID NO: 37941 - protein, 7 aa, synthetic construct
REYDAFP

SEQ ID NO: 37942 - protein, 7 aa, synthetic construct
RDEFKSY

SEQ ID NO: 37943 - protein, 7 aa, synthetic construct
YFSGTVS

SEQ ID NO: 37944 - protein, 7 aa, synthetic construct
RSEFLPY

SEQ ID NO: 37945 - protein, 7 aa, synthetic construct
YFTGRHE

SEQ ID NO: 37946 - protein, 7 aa, synthetic construct
TDPCKPP

SEQ ID NO: 37947 - protein, 7 aa, synthetic construct
YSRVSDP

SEQ ID NO: 37948 - protein, 7 aa, synthetic construct
YFSGVQQ

SEQ ID NO: 37949 - protein, 7 aa, synthetic construct
TRDGCMA

SEQ ID NO: 37950 - protein, 7 aa, synthetic construct
KDDFVSF

SEQ ID NO: 37951 - protein, 7 aa, synthetic construct
KDDFTGF

SEQ ID NO: 37952 - protein, 7 aa, synthetic construct
YFSGVQS

SEQ ID NO: 37953 - protein, 7 aa, synthetic construct
QMAAHDW

SEQ ID NO: 37954 - protein, 7 aa, synthetic construct
CAPDYHE

SEQ ID NO: 37955 - protein, 7 aa, synthetic construct
YFHGIQE

SEQ ID NO: 37956 - protein, 7 aa, synthetic construct
ILADRNW

SEQ ID NO: 37957 - protein, 7 aa, synthetic construct
LCKPCLA

SEQ ID NO: 37958 - protein, 7 aa, synthetic construct
YSRIEPN

SEQ ID NO: 37959 - protein, 7 aa, synthetic construct
RDGSSLW

SEQ ID NO: 37960 - protein, 7 aa, synthetic construct
GEDYVRW

SEQ ID NO: 37961 - protein, 7 aa, synthetic construct
YHANLPN

SEQ ID NO: 37962 - protein, 7 aa, synthetic construct
YFTGHPN

SEQ ID NO: 37963 - protein, 7 aa, synthetic construct
RGMDVYP

SEQ ID NO: 37964 - protein, 7 aa, synthetic construct
VMEFNAF

SEQ ID NO: 37965 - protein, 7 aa, synthetic construct
GSEFVRW

SEQ ID NO: 37966 - protein, 7 aa, synthetic construct
RMESRDW

SEQ ID NO: 37967 - protein, 7 aa, synthetic construct
RLEAVTW

SEQ ID NO: 37968 - protein, 7 aa, synthetic construct
TEYMCRP

SEQ ID NO: 37969 - protein, 7 aa, synthetic construct
RTNTVYP

SEQ ID NO: 37970 - protein, 7 aa, synthetic construct
YSRIGEN

SEQ ID NO: 37971 - protein, 7 aa, synthetic construct
YFHGKVE

SEQ ID NO: 37972 - protein, 7 aa, synthetic construct
YFSGVMS

SEQ ID NO: 37973 - protein, 7 aa, synthetic construct
YFSGTKD

SEQ ID NO: 37974 - protein, 7 aa, synthetic construct
RMEDRNW

SEQ ID NO: 37975 - protein, 7 aa, synthetic construct
YWSAIPA

SEQ ID NO: 37976 - protein, 7 aa, synthetic construct
CKPDSRV

SEQ ID NO: 37977 - protein, 7 aa, synthetic construct
KDQYTMF

SEQ ID NO: 37978 - protein, 7 aa, synthetic construct
IADHLRW

SEQ ID NO: 37979 - protein, 7 aa, synthetic construct
YYSGIVA

SEQ ID NO: 37980 - protein, 7 aa, synthetic construct
YWSGIHE

SEQ ID NO: 37981 - protein, 7 aa, synthetic construct
SMESHQW

SEQ ID NO: 37982 - protein, 7 aa, synthetic construct
YVRSQIG

SEQ ID NO: 37983 - protein, 7 aa, synthetic construct
VLESRDW

SEQ ID NO: 37984 - protein, 7 aa, synthetic construct
FHRLSVD

SEQ ID NO: 37985 - protein, 7 aa, synthetic construct
TSEYKYY

SEQ ID NO: 37986 - protein, 7 aa, synthetic construct
YFTGMVQ

SEQ ID NO: 37987 - protein, 7 aa, synthetic construct
YAKTAYN

SEQ ID NO: 37988 - protein, 7 aa, synthetic construct
YFTGKLV

SEQ ID NO: 37989 - protein, 7 aa, synthetic construct
GDGTSRW

SEQ ID NO: 37990 - protein, 7 aa, synthetic construct
KDDYSHY

SEQ ID NO: 37991 - protein, 7 aa, synthetic construct
LCKPCFT

SEQ ID NO: 37992 - protein, 7 aa, synthetic construct
TSTHCCA

SEQ ID NO: 37993 - protein, 7 aa, synthetic construct
YVKSQSY

SEQ ID NO: 37994 - protein, 7 aa, synthetic construct
REGTSKW

SEQ ID NO: 37995 - protein, 7 aa, synthetic construct
YWSGIAD

SEQ ID NO: 37996 - protein, 7 aa, synthetic construct
FWTGVKE

SEQ ID NO: 37997 - protein, 7 aa, synthetic construct
RRTDVYP

SEQ ID NO: 37998 - protein, 7 aa, synthetic construct
VLQSATW

SEQ ID NO: 37999 - protein, 7 aa, synthetic construct
RSMDSYP

SEQ ID NO: 38000 - protein, 7 aa, synthetic construct
YSRVGTG

SEQ ID NO: 38001 - protein, 7 aa, synthetic construct
VARLGWD

SEQ ID NO: 38002 - protein, 7 aa, synthetic construct
REDMVKW

SEQ ID NO: 38003 - protein, 7 aa, synthetic construct
YMKDAYP

SEQ ID NO: 38004 - protein, 7 aa, synthetic construct
MMDGTSA

SEQ ID NO: 38005 - protein, 7 aa, synthetic construct
YSRLGVG

SEQ ID NO: 38006 - protein, 7 aa, synthetic construct
YSRLQFD

SEQ ID NO: 38007 - protein, 7 aa, synthetic construct
KCIEDCC

SEQ ID NO: 38008 - protein, 7 aa, synthetic construct
QDGNSRW

SEQ ID NO: 38009 - protein, 7 aa, synthetic construct
CKPGTGL

SEQ ID NO: 38010 - protein, 7 aa, synthetic construct
YYTGKID

SEQ ID NO: 38011 - protein, 7 aa, synthetic construct
RDEFTRW

SEQ ID NO: 38012 - protein, 7 aa, synthetic construct
RSEFKTY

SEQ ID NO: 38013 - protein, 7 aa, synthetic construct
YWTGVPE

SEQ ID NO: 38014 - protein, 7 aa, synthetic construct
IMAERTW

SEQ ID NO: 38015 - protein, 7 aa, synthetic construct
YSRLSPI

SEQ ID NO: 38016 - protein, 7 aa, synthetic construct
GGAGSCW

SEQ ID NO: 38017 - protein, 7 aa, synthetic construct
GENVVRW

SEQ ID NO: 38018 - protein, 7 aa, synthetic construct
GSATSSW

SEQ ID NO: 38019 - protein, 7 aa, synthetic construct
RSDHVYP

SEQ ID NO: 38020 - protein, 7 aa, synthetic construct
YFSGIPQ

SEQ ID NO: 38021 - protein, 7 aa, synthetic construct
GPDHVRW

SEQ ID NO: 38022 - protein, 7 aa, synthetic construct
YDGSCKA

SEQ ID NO: 38023 - protein, 7 aa, synthetic construct
YWTGKIE

SEQ ID NO: 38024 - protein, 7 aa, synthetic construct
RLESTSW

SEQ ID NO: 38025 - protein, 7 aa, synthetic construct
RLEDRKW

SEQ ID NO: 38026 - protein, 7 aa, synthetic construct
LHRLSAG

SEQ ID NO: 38027 - protein, 7 aa, synthetic construct
CMKSREI

SEQ ID NO: 38028 - protein, 7 aa, synthetic construct
CGKIKPG

SEQ ID NO: 38029 - protein, 7 aa, synthetic construct
REEAVSW

SEQ ID NO: 38030 - protein, 7 aa, synthetic construct
YHRLSPE

SEQ ID NO: 38031 - protein, 7 aa, synthetic construct
YFSGKTD

SEQ ID NO: 38032 - protein, 7 aa, synthetic construct
YWTGVID

SEQ ID NO: 38033 - protein, 7 aa, synthetic construct
RKDDVFP

SEQ ID NO: 38034 - protein, 7 aa, synthetic construct
RMESIKW

SEQ ID NO: 38035 - protein, 7 aa, synthetic construct
RDFDVYP

SEQ ID NO: 38036 - protein, 7 aa, synthetic construct
YWTGMIE

SEQ ID NO: 38037 - protein, 7 aa, synthetic construct
PYARSVE

SEQ ID NO: 38038 - protein, 7 aa, synthetic construct
WWSGVGA

SEQ ID NO: 38039 - protein, 7 aa, synthetic construct
DLRDRGW

SEQ ID NO: 38040 - protein, 7 aa, synthetic construct
YFSGQKD

SEQ ID NO: 38041 - protein, 7 aa, synthetic construct
RPDSVRW

SEQ ID NO: 38042 - protein, 7 aa, synthetic construct
REDYVKY

SEQ ID NO: 38043 - protein, 7 aa, synthetic construct
IDDYVHW

SEQ ID NO: 38044 - protein, 7 aa, synthetic construct
NGPGCPW

SEQ ID NO: 38045 - protein, 7 aa, synthetic construct
RDDFVSF

SEQ ID NO: 38046 - protein, 7 aa, synthetic construct
FHRLSPN

SEQ ID NO: 38047 - protein, 7 aa, synthetic construct
VPSPCDG

SEQ ID NO: 38048 - protein, 7 aa, synthetic construct
RAVDAYP

SEQ ID NO: 38049 - protein, 7 aa, synthetic construct
WRTGTCA

SEQ ID NO: 38050 - protein, 7 aa, synthetic construct
YFSGKAE

SEQ ID NO: 38051 - protein, 7 aa, synthetic construct
PYARSEM

SEQ ID NO: 38052 - protein, 7 aa, synthetic construct
VPDWVEF

SEQ ID NO: 38053 - protein, 7 aa, synthetic construct
LCRPCHE

SEQ ID NO: 38054 - protein, 7 aa, synthetic construct
YFSGVSE

SEQ ID NO: 38055 - protein, 7 aa, synthetic construct
CDGPCCP

SEQ ID NO: 38056 - protein, 7 aa, synthetic construct
YFSGQLE

SEQ ID NO: 38057 - protein, 7 aa, synthetic construct
RDISVFP

SEQ ID NO: 38058 - protein, 7 aa, synthetic construct
SRSTNGI

SEQ ID NO: 38059 - protein, 7 aa, synthetic construct
REDFVKY

SEQ ID NO: 38060 - protein, 7 aa, synthetic construct
YFTGKTN

SEQ ID NO: 38061 - protein, 7 aa, synthetic construct
YSRLNMD

SEQ ID NO: 38062 - protein, 7 aa, synthetic construct
LHRLHVD

SEQ ID NO: 38063 - protein, 7 aa, synthetic construct
LTRLQSN

SEQ ID NO: 38064 - protein, 7 aa, synthetic construct
DMQSRDW

SEQ ID NO: 38065 - protein, 7 aa, synthetic construct
QEDYVTW

SEQ ID NO: 38066 - protein, 7 aa, synthetic construct
YVRSDMH

SEQ ID NO: 38067 - protein, 7 aa, synthetic construct
YFTGRPD

SEQ ID NO: 38068 - protein, 7 aa, synthetic construct
LHRLSEH

SEQ ID NO: 38069 - protein, 7 aa, synthetic construct
YTRLDPM

SEQ ID NO: 38070 - protein, 7 aa, synthetic construct
WWTGVCE

SEQ ID NO: 38071 - protein, 7 aa, synthetic construct
NDGISKW

SEQ ID NO: 38072 - protein, 7 aa, synthetic construct
RDMDAYP

SEQ ID NO: 38073 - protein, 7 aa, synthetic construct
RSDFKIY

SEQ ID NO: 38074 - protein, 7 aa, synthetic construct
YFAGKHD

SEQ ID NO: 38075 - protein, 7 aa, synthetic construct
CAPVCCE

SEQ ID NO: 38076 - protein, 7 aa, synthetic construct
YTRLDPH

SEQ ID NO: 38077 - protein, 7 aa, synthetic construct
VPEHCKD

SEQ ID NO: 38078 - protein, 7 aa, synthetic construct
YFSGVMD

SEQ ID NO: 38079 - protein, 7 aa, synthetic construct
YDSTNGL

SEQ ID NO: 38080 - protein, 7 aa, synthetic construct
YFHGKVA

SEQ ID NO: 38081 - protein, 7 aa, synthetic construct
RLEDRSW

SEQ ID NO: 38082 - protein, 7 aa, synthetic construct
MRNTHCD

SEQ ID NO: 38083 - protein, 7 aa, synthetic construct
NTYDSYP

SEQ ID NO: 38084 - protein, 7 aa, synthetic construct
YSRIQPD

SEQ ID NO: 38085 - protein, 7 aa, synthetic construct
CRGEQKM

SEQ ID NO: 38086 - protein, 7 aa, synthetic construct
YSRLQND

SEQ ID NO: 38087 - protein, 7 aa, synthetic construct
LCRPCSI

SEQ ID NO: 38088 - protein, 7 aa, synthetic construct
YLKSQSW

SEQ ID NO: 38089 - protein, 7 aa, synthetic construct
VPLKGWD

SEQ ID NO: 38090 - protein, 7 aa, synthetic construct
YHRLGED

SEQ ID NO: 38091 - protein, 7 aa, synthetic construct
LHANGPN

SEQ ID NO: 38092 - protein, 7 aa, synthetic construct
GDGYSKW

SEQ ID NO: 38093 - protein, 7 aa, synthetic construct
YFTGVPS

SEQ ID NO: 38094 - protein, 7 aa, synthetic construct
KNAEVYP

SEQ ID NO: 38095 - protein, 7 aa, synthetic construct
VDEWKTY

SEQ ID NO: 38096 - protein, 7 aa, synthetic construct
WTDMCKA

SEQ ID NO: 38097 - protein, 7 aa, synthetic construct
YFSGIPV

SEQ ID NO: 38098 - protein, 7 aa, synthetic construct
GVNGCKP

SEQ ID NO: 38099 - protein, 7 aa, synthetic construct
YFSGTVD

SEQ ID NO: 38100 - protein, 7 aa, synthetic construct
GDEWIPY

SEQ ID NO: 38101 - protein, 7 aa, synthetic construct
YFSGKMD

SEQ ID NO: 38102 - protein, 7 aa, synthetic construct
RDEFKSF

SEQ ID NO: 38103 - protein, 7 aa, synthetic construct
YLKSQLY

SEQ ID NO: 38104 - protein, 7 aa, synthetic construct
VPLRGIG

SEQ ID NO: 38105 - protein, 7 aa, synthetic construct
YVRSDSM

SEQ ID NO: 38106 - protein, 7 aa, synthetic construct
YFTGERE

SEQ ID NO: 38107 - protein, 7 aa, synthetic construct
YHRLGQD

SEQ ID NO: 38108 - protein, 7 aa, synthetic construct
RTEFTTY

SEQ ID NO: 38109 - protein, 7 aa, synthetic construct
YFAGVRA

SEQ ID NO: 38110 - protein, 7 aa, synthetic construct
KDDWTPF

SEQ ID NO: 38111 - protein, 7 aa, synthetic construct
WWSGTKE

SEQ ID NO: 38112 - protein, 7 aa, synthetic construct
YFAGKRD

SEQ ID NO: 38113 - protein, 7 aa, synthetic construct
YSRLQFN

SEQ ID NO: 38114 - protein, 7 aa, synthetic construct
YYTGVRE

SEQ ID NO: 38115 - protein, 7 aa, synthetic construct
YTRIGMN

SEQ ID NO: 38116 - protein, 7 aa, synthetic construct
YHRLDPD

SEQ ID NO: 38117 - protein, 7 aa, synthetic construct
YFTGEFE

SEQ ID NO: 38118 - protein, 7 aa, synthetic construct
YFHGQIE

SEQ ID NO: 38119 - protein, 7 aa, synthetic construct
YFQGKID

SEQ ID NO: 38120 - protein, 7 aa, synthetic construct
YFSGIMQ

SEQ ID NO: 38121 - protein, 7 aa, synthetic construct
YFSGQHE

SEQ ID NO: 38122 - protein, 7 aa, synthetic construct
YSRLGAD

SEQ ID NO: 38123 - protein, 7 aa, synthetic construct
IAREGWD

SEQ ID NO: 38124 - protein, 7 aa, synthetic construct
YSRLGMG

SEQ ID NO: 38125 - protein, 7 aa, synthetic construct
RDFDAYP

SEQ ID NO: 38126 - protein, 7 aa, synthetic construct
HMADRGW

SEQ ID NO: 38127 - protein, 7 aa, synthetic construct
YVRSQLN

SEQ ID NO: 38128 - protein, 7 aa, synthetic construct
YFTGERD

SEQ ID NO: 38129 - protein, 7 aa, synthetic construct
RDDFSGW

SEQ ID NO: 38130 - protein, 7 aa, synthetic construct
VLSSQGW

SEQ ID NO: 38131 - protein, 7 aa, synthetic construct
LKDGTGP

SEQ ID NO: 38132 - protein, 7 aa, synthetic construct
VHDYMSY

SEQ ID NO: 38133 - protein, 7 aa, synthetic construct
LHRLHTS

SEQ ID NO: 38134 - protein, 7 aa, synthetic construct
YFHGKID

SEQ ID NO: 38135 - protein, 7 aa, synthetic construct
YSRVQPD

SEQ ID NO: 38136 - protein, 7 aa, synthetic construct
GGPGSHW

SEQ ID NO: 38137 - protein, 7 aa, synthetic construct
YFSRVIE

SEQ ID NO: 38138 - protein, 7 aa, synthetic construct
YYSGIQA

SEQ ID NO: 38139 - protein, 7 aa, synthetic construct
APETVRW

SEQ ID NO: 38140 - protein, 7 aa, synthetic construct
CREGTVR

SEQ ID NO: 38141 - protein, 7 aa, synthetic construct
LEDWVKY

SEQ ID NO: 38142 - protein, 7 aa, synthetic construct
CTSKGGH

SEQ ID NO: 38143 - protein, 7 aa, synthetic construct
LHRLQEY

SEQ ID NO: 38144 - protein, 7 aa, synthetic construct
RSEFMTY

SEQ ID NO: 38145 - protein, 7 aa, synthetic construct
CAPYQHE

SEQ ID NO: 38146 - protein, 7 aa, synthetic construct
YWSGVAA

SEQ ID NO: 38147 - protein, 7 aa, synthetic construct
TKWGDAA

SEQ ID NO: 38148 - protein, 7 aa, synthetic construct
LSRTAFD

SEQ ID NO: 38149 - protein, 7 aa, synthetic construct
YFTGTHS

SEQ ID NO: 38150 - protein, 7 aa, synthetic construct
IMSSKLW

SEQ ID NO: 38151 - protein, 7 aa, synthetic construct
YWAGKLE

SEQ ID NO: 38152 - protein, 7 aa, synthetic construct
YYSGIVS

SEQ ID NO: 38153 - protein, 7 aa, synthetic construct
CKPICCE

SEQ ID NO: 38154 - protein, 7 aa, synthetic construct
RSHDAFP

SEQ ID NO: 38155 - protein, 7 aa, synthetic construct
FFTGKVA

SEQ ID NO: 38156 - protein, 7 aa, synthetic construct
ILSDRMW

SEQ ID NO: 38157 - protein, 7 aa, synthetic construct
EGISRSW

SEQ ID NO: 38158 - protein, 7 aa, synthetic construct
RDEFMSY

SEQ ID NO: 38159 - protein, 7 aa, synthetic construct
GSEYLAW

SEQ ID NO: 38160 - protein, 7 aa, synthetic construct
GNEFSSW

SEQ ID NO: 38161 - protein, 7 aa, synthetic construct
GSGLSHW

SEQ ID NO: 38162 - protein, 7 aa, synthetic construct
RDDFVSY

SEQ ID NO: 38163 - protein, 7 aa, synthetic construct
SMASSSW

SEQ ID NO: 38164 - protein, 7 aa, synthetic construct
YFSGVVN

SEQ ID NO: 38165 - protein, 7 aa, synthetic construct
YFSGQIQ

SEQ ID NO: 38166 - protein, 7 aa, synthetic construct
KDGYSIY

SEQ ID NO: 38167 - protein, 7 aa, synthetic construct
RSEFHSF

SEQ ID NO: 38168 - protein, 7 aa, synthetic construct
YFSGRME

SEQ ID NO: 38169 - protein, 7 aa, synthetic construct
RMDSSGW

SEQ ID NO: 38170 - protein, 7 aa, synthetic construct
YFHGKCD

SEQ ID NO: 38171 - protein, 7 aa, synthetic construct
DTATCLR

SEQ ID NO: 38172 - protein, 7 aa, synthetic construct
RDGNSSW

SEQ ID NO: 38173 - protein, 7 aa, synthetic construct
FAKHGCG

SEQ ID NO: 38174 - protein, 7 aa, synthetic construct
YWTGVPD

SEQ ID NO: 38175 - protein, 7 aa, synthetic construct
YTRLGDG

SEQ ID NO: 38176 - protein, 7 aa, synthetic construct
CKYLKSD

SEQ ID NO: 38177 - protein, 7 aa, synthetic construct
KDGYSSW

SEQ ID NO: 38178 - protein, 7 aa, synthetic construct
YVRSQDN

SEQ ID NO: 38179 - protein, 7 aa, synthetic construct
YTRLDFN

SEQ ID NO: 38180 - protein, 7 aa, synthetic construct
RSEFMSF

SEQ ID NO: 38181 - protein, 7 aa, synthetic construct
YFTGMVD

SEQ ID NO: 38182 - protein, 7 aa, synthetic construct
IAHRGWD

SEQ ID NO: 38183 - protein, 7 aa, synthetic construct
YFTGVHK

SEQ ID NO: 38184 - protein, 7 aa, synthetic construct
YSRLNEQ

SEQ ID NO: 38185 - protein, 7 aa, synthetic construct
LAKTACN

SEQ ID NO: 38186 - protein, 7 aa, synthetic construct
NMTSHSW

SEQ ID NO: 38187 - protein, 7 aa, synthetic construct
KDYTVFP

SEQ ID NO: 38188 - protein, 7 aa, synthetic construct
VAMKGAG

SEQ ID NO: 38189 - protein, 7 aa, synthetic construct
YFSNIKE

SEQ ID NO: 38190 - protein, 7 aa, synthetic construct
GIETVRW

SEQ ID NO: 38191 - protein, 7 aa, synthetic construct
YTRLDNG

SEQ ID NO: 38192 - protein, 7 aa, synthetic construct
CVRPQTP

SEQ ID NO: 38193 - protein, 7 aa, synthetic construct
YFSGIGA

SEQ ID NO: 38194 - protein, 7 aa, synthetic construct
YVKSGPM

SEQ ID NO: 38195 - protein, 7 aa, synthetic construct
YFHGVAA

SEQ ID NO: 38196 - protein, 7 aa, synthetic construct
YFSKVRE

SEQ ID NO: 38197 - protein, 7 aa, synthetic construct
YFTGFHE

SEQ ID NO: 38198 - protein, 7 aa, synthetic construct
YFHGVVE

SEQ ID NO: 38199 - protein, 7 aa, synthetic construct
RLDDRGW

SEQ ID NO: 38200 - protein, 7 aa, synthetic construct
YDKGTWD

SEQ ID NO: 38201 - protein, 7 aa, synthetic construct
RNEFVTY

SEQ ID NO: 38202 - protein, 7 aa, synthetic construct
YTRLNPD

SEQ ID NO: 38203 - protein, 7 aa, synthetic construct
YSRIGPY

SEQ ID NO: 38204 - protein, 7 aa, synthetic construct
IPGFCGP

SEQ ID NO: 38205 - protein, 7 aa, synthetic construct
RMESVIW

SEQ ID NO: 38206 - protein, 7 aa, synthetic construct
YYSGIRE

SEQ ID NO: 38207 - protein, 7 aa, synthetic construct
YFSGKLS

SEQ ID NO: 38208 - protein, 7 aa, synthetic construct
YFTGMRA

SEQ ID NO: 38209 - protein, 7 aa, synthetic construct
RMADRDW

SEQ ID NO: 38210 - protein, 7 aa, synthetic construct
YVKYENP

SEQ ID NO: 38211 - protein, 7 aa, synthetic construct
GGDGSHW

SEQ ID NO: 38212 - protein, 7 aa, synthetic construct
YYTGKCE

SEQ ID NO: 38213 - protein, 7 aa, synthetic construct
YVKSQPM

SEQ ID NO: 38214 - protein, 7 aa, synthetic construct
LLADRTW

SEQ ID NO: 38215 - protein, 7 aa, synthetic construct
YFSGQLD

SEQ ID NO: 38216 - protein, 7 aa, synthetic construct
KMSDHTW

SEQ ID NO: 38217 - protein, 7 aa, synthetic construct
YFSGTHE

SEQ ID NO: 38218 - protein, 7 aa, synthetic construct
YWSGTIA

SEQ ID NO: 38219 - protein, 7 aa, synthetic construct
YSRLHPM

SEQ ID NO: 38220 - protein, 7 aa, synthetic construct
YFSGIHV

SEQ ID NO: 38221 - protein, 7 aa, synthetic construct
YFSGKIN

SEQ ID NO: 38222 - protein, 7 aa, synthetic construct
YFSGKAD

SEQ ID NO: 38223 - protein, 7 aa, synthetic construct
YSRIGPD

SEQ ID NO: 38224 - protein, 7 aa, synthetic construct
RDATSSW

SEQ ID NO: 38225 - protein, 7 aa, synthetic construct
YSRIGGG

SEQ ID NO: 38226 - protein, 7 aa, synthetic construct
YSRLGDD

SEQ ID NO: 38227 - protein, 7 aa, synthetic construct
CDKEPCC

SEQ ID NO: 38228 - protein, 7 aa, synthetic construct
WWSGLKE

SEQ ID NO: 38229 - protein, 7 aa, synthetic construct
YHRIGPN

SEQ ID NO: 38230 - protein, 7 aa, synthetic construct
KFDYSSC

SEQ ID NO: 38231 - protein, 7 aa, synthetic construct
ENDFKIF

SEQ ID NO: 38232 - protein, 7 aa, synthetic construct
IWSTNGV

SEQ ID NO: 38233 - protein, 7 aa, synthetic construct
YFTGFAE

SEQ ID NO: 38234 - protein, 7 aa, synthetic construct
HCEGRPV

SEQ ID NO: 38235 - protein, 7 aa, synthetic construct
YFTGMIA

SEQ ID NO: 38236 - protein, 7 aa, synthetic construct
CGRPQME

SEQ ID NO: 38237 - protein, 7 aa, synthetic construct
RDESSYW

SEQ ID NO: 38238 - protein, 7 aa, synthetic construct
GMEFCRP

SEQ ID NO: 38239 - protein, 7 aa, synthetic construct
CGGGTAG

SEQ ID NO: 38240 - protein, 7 aa, synthetic construct
YFTGVTD

SEQ ID NO: 38241 - protein, 7 aa, synthetic construct
YFAGIIE

SEQ ID NO: 38242 - protein, 7 aa, synthetic construct
YFEGRKE

SEQ ID NO: 38243 - protein, 7 aa, synthetic construct
YLKSQEY

SEQ ID NO: 38244 - protein, 7 aa, synthetic construct
YSKLNVV

SEQ ID NO: 38245 - protein, 7 aa, synthetic construct
LWDGTNP

SEQ ID NO: 38246 - protein, 7 aa, synthetic construct
FFSGILE

SEQ ID NO: 38247 - protein, 7 aa, synthetic construct
YFSAIKE

SEQ ID NO: 38248 - protein, 7 aa, synthetic construct
YWTGKIA

SEQ ID NO: 38249 - protein, 7 aa, synthetic construct
LCRPCDE

SEQ ID NO: 38250 - protein, 7 aa, synthetic construct
FFSGVRE

SEQ ID NO: 38251 - protein, 7 aa, synthetic construct
EPESRKW

SEQ ID NO: 38252 - protein, 7 aa, synthetic construct
HSKMNYN

SEQ ID NO: 38253 - protein, 7 aa, synthetic construct
RDDFSAF

SEQ ID NO: 38254 - protein, 7 aa, synthetic construct
YSRLNDP

SEQ ID NO: 38255 - protein, 7 aa, synthetic construct
YSRLSFD

SEQ ID NO: 38256 - protein, 7 aa, synthetic construct
DDGTSKW

SEQ ID NO: 38257 - protein, 7 aa, synthetic construct
YFTGTNS

SEQ ID NO: 38258 - protein, 7 aa, synthetic construct
YVKYDTS

SEQ ID NO: 38259 - protein, 7 aa, synthetic construct
YSRIGED

SEQ ID NO: 38260 - protein, 7 aa, synthetic construct
YYSGIAA

SEQ ID NO: 38261 - protein, 7 aa, synthetic construct
GGATSSW

SEQ ID NO: 38262 - protein, 7 aa, synthetic construct
YENGCKE

SEQ ID NO: 38263 - protein, 7 aa, synthetic construct
YSRLNLM

SEQ ID NO: 38264 - protein, 7 aa, synthetic construct
KDEFTKY

SEQ ID NO: 38265 - protein, 7 aa, synthetic construct
MWDGTGP

SEQ ID NO: 38266 - protein, 7 aa, synthetic construct
DYACKKE

SEQ ID NO: 38267 - protein, 7 aa, synthetic construct
WTPVCKA

SEQ ID NO: 38268 - protein, 7 aa, synthetic construct
RECGVGP

SEQ ID NO: 38269 - protein, 7 aa, synthetic construct
YFTGKQS

SEQ ID NO: 38270 - protein, 7 aa, synthetic construct
YYTGVVA

SEQ ID NO: 38271 - protein, 7 aa, synthetic construct
KDEFRTY

SEQ ID NO: 38272 - protein, 7 aa, synthetic construct
YHRLGDD

SEQ ID NO: 38273 - protein, 7 aa, synthetic construct
LHRLLPN

SEQ ID NO: 38274 - protein, 7 aa, synthetic construct
RDDYTSW

SEQ ID NO: 38275 - protein, 7 aa, synthetic construct
RDAMSSW

SEQ ID NO: 38276 - protein, 7 aa, synthetic construct
YVRSDPR

SEQ ID NO: 38277 - protein, 7 aa, synthetic construct
YFTGTYS

SEQ ID NO: 38278 - protein, 7 aa, synthetic construct
RLEDRAW

SEQ ID NO: 38279 - protein, 7 aa, synthetic construct
YWRLSDN

SEQ ID NO: 38280 - protein, 7 aa, synthetic construct
LWDGTNA

SEQ ID NO: 38281 - protein, 7 aa, synthetic construct
RDDYSTF

SEQ ID NO: 38282 - protein, 7 aa, synthetic construct
HSRLNIV

SEQ ID NO: 38283 - protein, 7 aa, synthetic construct
YFSGRQE

SEQ ID NO: 38284 - protein, 7 aa, synthetic construct
RHSKLPG

SEQ ID NO: 38285 - protein, 7 aa, synthetic construct
DMESYDW

SEQ ID NO: 38286 - protein, 7 aa, synthetic construct
QLSDRTW

SEQ ID NO: 38287 - protein, 7 aa, synthetic construct
FWSGVKE

SEQ ID NO: 38288 - protein, 7 aa, synthetic construct
YVRSDAM

SEQ ID NO: 38289 - protein, 7 aa, synthetic construct
YFTGTVK

SEQ ID NO: 38290 - protein, 7 aa, synthetic construct
YSVAGCN

SEQ ID NO: 38291 - protein, 7 aa, synthetic construct
YFTGYPD

SEQ ID NO: 38292 - protein, 7 aa, synthetic construct
IMSSAGW

SEQ ID NO: 38293 - protein, 7 aa, synthetic construct
KDEFKTY

SEQ ID NO: 38294 - protein, 7 aa, synthetic construct
DMGDRKW

SEQ ID NO: 38295 - protein, 7 aa, synthetic construct
DMRSANW

SEQ ID NO: 38296 - protein, 7 aa, synthetic construct
YSKKNVN

SEQ ID NO: 38297 - protein, 7 aa, synthetic construct
REPGVRW

SEQ ID NO: 38298 - protein, 7 aa, synthetic construct
REDEVYW

SEQ ID NO: 38299 - protein, 7 aa, synthetic construct
YFTGMTD

SEQ ID NO: 38300 - protein, 7 aa, synthetic construct
YFSGKHD

SEQ ID NO: 38301 - protein, 7 aa, synthetic construct
YFSGTYD

SEQ ID NO: 38302 - protein, 7 aa, synthetic construct
REENVYW

SEQ ID NO: 38303 - protein, 7 aa, synthetic construct
YFSGRTA

SEQ ID NO: 38304 - protein, 7 aa, synthetic construct
VMQASNW

SEQ ID NO: 38305 - protein, 7 aa, synthetic construct
RDDYSTY

SEQ ID NO: 38306 - protein, 7 aa, synthetic construct
TCKAQMG

SEQ ID NO: 38307 - protein, 7 aa, synthetic construct
GSSTSTW

SEQ ID NO: 38308 - protein, 7 aa, synthetic construct
RGDRVFP

SEQ ID NO: 38309 - protein, 7 aa, synthetic construct
LHKLQPC

SEQ ID NO: 38310 - protein, 7 aa, synthetic construct
RLQDVTW

SEQ ID NO: 38311 - protein, 7 aa, synthetic construct
RDDYVHW

SEQ ID NO: 38312 - protein, 7 aa, synthetic construct
LMSDRSW

SEQ ID NO: 38313 - protein, 7 aa, synthetic construct
FHKMNYN

SEQ ID NO: 38314 - protein, 7 aa, synthetic construct
RDDYLSW

SEQ ID NO: 38315 - protein, 7 aa, synthetic construct
YWSGVKL

SEQ ID NO: 38316 - protein, 7 aa, synthetic construct
YFSGILG

SEQ ID NO: 38317 - protein, 7 aa, synthetic construct
YFSGQIM

SEQ ID NO: 38318 - protein, 7 aa, synthetic construct
YFSGTYE

SEQ ID NO: 38319 - protein, 7 aa, synthetic construct
RLESVSW

SEQ ID NO: 38320 - protein, 7 aa, synthetic construct
IWSTNGI

SEQ ID NO: 38321 - protein, 7 aa, synthetic construct
YHARGLN

SEQ ID NO: 38322 - protein, 7 aa, synthetic construct
CAGMCGA

SEQ ID NO: 38323 - protein, 7 aa, synthetic construct
RCERPPA

SEQ ID NO: 38324 - protein, 7 aa, synthetic construct
KDDFSAY

SEQ ID NO: 38325 - protein, 7 aa, synthetic construct
RMEALDW

SEQ ID NO: 38326 - protein, 7 aa, synthetic construct
CKANPPE

SEQ ID NO: 38327 - protein, 7 aa, synthetic construct
VPDFVKW

SEQ ID NO: 38328 - protein, 7 aa, synthetic construct
YWSTIKE

SEQ ID NO: 38329 - protein, 7 aa, synthetic construct
QNEFSTY

SEQ ID NO: 38330 - protein, 7 aa, synthetic construct
DWYGNAA

SEQ ID NO: 38331 - protein, 7 aa, synthetic construct
SMESRTW

SEQ ID NO: 38332 - protein, 7 aa, synthetic construct
RCGGDWP

SEQ ID NO: 38333 - protein, 7 aa, synthetic construct
LCRPCYE

SEQ ID NO: 38334 - protein, 7 aa, synthetic construct
YTRLQNT

SEQ ID NO: 38335 - protein, 7 aa, synthetic construct
YYTGVIA

SEQ ID NO: 38336 - protein, 7 aa, synthetic construct
YFAGRTE

SEQ ID NO: 38337 - protein, 7 aa, synthetic construct
IHRLSPD

SEQ ID NO: 38338 - protein, 7 aa, synthetic construct
YFQGIRE

SEQ ID NO: 38339 - protein, 7 aa, synthetic construct
LHRLHPL

SEQ ID NO: 38340 - protein, 7 aa, synthetic construct
LSKSSIN

SEQ ID NO: 38341 - protein, 7 aa, synthetic construct
YFSGVVP

SEQ ID NO: 38342 - protein, 7 aa, synthetic construct
YFSGISK

SEQ ID NO: 38343 - protein, 7 aa, synthetic construct
KMQDRSW

SEQ ID NO: 38344 - protein, 7 aa, synthetic construct
FFTGTFD

SEQ ID NO: 38345 - protein, 7 aa, synthetic construct
CKAPCCP

SEQ ID NO: 38346 - protein, 7 aa, synthetic construct
YFTGRSD

SEQ ID NO: 38347 - protein, 7 aa, synthetic construct
FWSGVVE

SEQ ID NO: 38348 - protein, 7 aa, synthetic construct
DLKSASW

SEQ ID NO: 38349 - protein, 7 aa, synthetic construct
YVRSDVH

SEQ ID NO: 38350 - protein, 7 aa, synthetic construct
WWSGIPM

SEQ ID NO: 38351 - protein, 7 aa, synthetic construct
FFSGIIA

SEQ ID NO: 38352 - protein, 7 aa, synthetic construct
YHRLSND

SEQ ID NO: 38353 - protein, 7 aa, synthetic construct
YSRLNNL

SEQ ID NO: 38354 - protein, 7 aa, synthetic construct
CAPRLHE

SEQ ID NO: 38355 - protein, 7 aa, synthetic construct
FVKSQPG

SEQ ID NO: 38356 - protein, 7 aa, synthetic construct
LCRPCSV

SEQ ID NO: 38357 - protein, 7 aa, synthetic construct
DMATSTW

SEQ ID NO: 38358 - protein, 7 aa, synthetic construct
YFSGITG

SEQ ID NO: 38359 - protein, 7 aa, synthetic construct
DMGSSNW

SEQ ID NO: 38360 - protein, 7 aa, synthetic construct
YFSGIQH

SEQ ID NO: 38361 - protein, 7 aa, synthetic construct
YWTGVSD

SEQ ID NO: 38362 - protein, 7 aa, synthetic construct
LCKPCLE

SEQ ID NO: 38363 - protein, 7 aa, synthetic construct
ELDSREW

SEQ ID NO: 38364 - protein, 7 aa, synthetic construct
RDDWVKW

SEQ ID NO: 38365 - protein, 7 aa, synthetic construct
YVRSDFR

SEQ ID NO: 38366 - protein, 7 aa, synthetic construct
YFSGIMP

SEQ ID NO: 38367 - protein, 7 aa, synthetic construct
YWTGMLD

SEQ ID NO: 38368 - protein, 7 aa, synthetic construct
YWTGMVD

SEQ ID NO: 38369 - protein, 7 aa, synthetic construct
YVRSDSL

SEQ ID NO: 38370 - protein, 7 aa, synthetic construct
CKPHPLL

SEQ ID NO: 38371 - protein, 7 aa, synthetic construct
NMGSRDW

SEQ ID NO: 38372 - protein, 7 aa, synthetic construct
GDGTKCG

SEQ ID NO: 38373 - protein, 7 aa, synthetic construct
YWSGVPE

SEQ ID NO: 38374 - protein, 7 aa, synthetic construct
VAGKGCG

SEQ ID NO: 38375 - protein, 7 aa, synthetic construct
YFSGRAE

SEQ ID NO: 38376 - protein, 7 aa, synthetic construct
YFAGRFD

SEQ ID NO: 38377 - protein, 7 aa, synthetic construct
KDDYQTW

SEQ ID NO: 38378 - protein, 7 aa, synthetic construct
RNEFTSW

SEQ ID NO: 38379 - protein, 7 aa, synthetic construct
YSRLGED

SEQ ID NO: 38380 - protein, 7 aa, synthetic construct
YSRLSPN

SEQ ID NO: 38381 - protein, 7 aa, synthetic construct
YWTGKVE

SEQ ID NO: 38382 - protein, 7 aa, synthetic construct
GDEYMPF

SEQ ID NO: 38383 - protein, 7 aa, synthetic construct
VPDYVKY

SEQ ID NO: 38384 - protein, 7 aa, synthetic construct
YSRLHID

SEQ ID NO: 38385 - protein, 7 aa, synthetic construct
YSRIGPC

SEQ ID NO: 38386 - protein, 7 aa, synthetic construct
YFSGTVF

SEQ ID NO: 38387 - protein, 7 aa, synthetic construct
KDDWVKY

SEQ ID NO: 38388 - protein, 7 aa, synthetic construct
YFSGQVM

SEQ ID NO: 38389 - protein, 7 aa, synthetic construct
IMASQSW

SEQ ID NO: 38390 - protein, 7 aa, synthetic construct
YSRVGDG

SEQ ID NO: 38391 - protein, 7 aa, synthetic construct
IMEDRGW

SEQ ID NO: 38392 - protein, 7 aa, synthetic construct
YFTGRAD

SEQ ID NO: 38393 - protein, 7 aa, synthetic construct
LWNGEGP

SEQ ID NO: 38394 - protein, 7 aa, synthetic construct
WFSGIKD

SEQ ID NO: 38395 - protein, 7 aa, synthetic construct
VDDYNIY

SEQ ID NO: 38396 - protein, 7 aa, synthetic construct
RTSTNGV

SEQ ID NO: 38397 - protein, 7 aa, synthetic construct
RDEYSPW

SEQ ID NO: 38398 - protein, 7 aa, synthetic construct
YSRLSPM

SEQ ID NO: 38399 - protein, 7 aa, synthetic construct
YFTGVTH

SEQ ID NO: 38400 - protein, 7 aa, synthetic construct
CLRARPE

SEQ ID NO: 38401 - protein, 7 aa, synthetic construct
YFTGQQA

SEQ ID NO: 38402 - protein, 7 aa, synthetic construct
FFTGRID

SEQ ID NO: 38403 - protein, 7 aa, synthetic construct
YFSGMRD

SEQ ID NO: 38404 - protein, 7 aa, synthetic construct
MLPGCKP

SEQ ID NO: 38405 - protein, 7 aa, synthetic construct
RNEFSTF

SEQ ID NO: 38406 - protein, 7 aa, synthetic construct
GVETCKP

SEQ ID NO: 38407 - protein, 7 aa, synthetic construct
YFSGTTE

SEQ ID NO: 38408 - protein, 7 aa, synthetic construct
YVRSQTL

SEQ ID NO: 38409 - protein, 7 aa, synthetic construct
LCKPCSE

SEQ ID NO: 38410 - protein, 7 aa, synthetic construct
REEEVRW

SEQ ID NO: 38411 - protein, 7 aa, synthetic construct
DLQSSVW

SEQ ID NO: 38412 - protein, 7 aa, synthetic construct
CKPSPYP

SEQ ID NO: 38413 - protein, 7 aa, synthetic construct
VMQSRTW

SEQ ID NO: 38414 - protein, 7 aa, synthetic construct
RLPSVYP

SEQ ID NO: 38415 - protein, 7 aa, synthetic construct
KDGYTSW

SEQ ID NO: 38416 - protein, 7 aa, synthetic construct
YSRNSCN

SEQ ID NO: 38417 - protein, 7 aa, synthetic construct
YWSKVLD

SEQ ID NO: 38418 - protein, 7 aa, synthetic construct
YFTGLRD

SEQ ID NO: 38419 - protein, 7 aa, synthetic construct
YIKYDPS

SEQ ID NO: 38420 - protein, 7 aa, synthetic construct
YVRSDTR

SEQ ID NO: 38421 - protein, 7 aa, synthetic construct
YFTGAFD

SEQ ID NO: 38422 - protein, 7 aa, synthetic construct
ILSHATW

SEQ ID NO: 38423 - protein, 7 aa, synthetic construct
YSRLSDP

SEQ ID NO: 38424 - protein, 7 aa, synthetic construct
YFTGRVS

SEQ ID NO: 38425 - protein, 7 aa, synthetic construct
YYTGIRD

SEQ ID NO: 38426 - protein, 7 aa, synthetic construct
YWTGVQD

SEQ ID NO: 38427 - protein, 7 aa, synthetic construct
YFSGVMH

SEQ ID NO: 38428 - protein, 7 aa, synthetic construct
RDDFTGW

SEQ ID NO: 38429 - protein, 7 aa, synthetic construct
YFHGIRE

SEQ ID NO: 38430 - protein, 7 aa, synthetic construct
YFSGQRE

SEQ ID NO: 38431 - protein, 7 aa, synthetic construct
YSRIGPL

SEQ ID NO: 38432 - protein, 7 aa, synthetic construct
RDEYVHW

SEQ ID NO: 38433 - protein, 7 aa, synthetic construct
YSRISDN

SEQ ID NO: 38434 - protein, 7 aa, synthetic construct
YFSGQIK

SEQ ID NO: 38435 - protein, 7 aa, synthetic construct
YFHGKLD

SEQ ID NO: 38436 - protein, 7 aa, synthetic construct
FSRLSAN

SEQ ID NO: 38437 - protein, 7 aa, synthetic construct
YVRSDIG

SEQ ID NO: 38438 - protein, 7 aa, synthetic construct
RSEFATY

SEQ ID NO: 38439 - protein, 7 aa, synthetic construct
YFQGRIA

SEQ ID NO: 38440 - protein, 7 aa, synthetic construct
YEPNCKE

SEQ ID NO: 38441 - protein, 7 aa, synthetic construct
REEMVSW

SEQ ID NO: 38442 - protein, 7 aa, synthetic construct
RMEERSW

SEQ ID NO: 38443 - protein, 7 aa, synthetic construct
QNDYVSY

SEQ ID NO: 38444 - protein, 7 aa, synthetic construct
RDGTCKP

SEQ ID NO: 38445 - protein, 7 aa, synthetic construct
YSRLQPT

SEQ ID NO: 38446 - protein, 7 aa, synthetic construct
DMRDRIW

SEQ ID NO: 38447 - protein, 7 aa, synthetic construct
CKATIPG

SEQ ID NO: 38448 - protein, 7 aa, synthetic construct
YFTGMYD

SEQ ID NO: 38449 - protein, 7 aa, synthetic construct
HNSTNGR

SEQ ID NO: 38450 - protein, 7 aa, synthetic construct
VPEDCRP

SEQ ID NO: 38451 - protein, 7 aa, synthetic construct
RPLMEKC

SEQ ID NO: 38452 - protein, 7 aa, synthetic construct
YFSGVTS

SEQ ID NO: 38453 - protein, 7 aa, synthetic construct
EPESRAW

SEQ ID NO: 38454 - protein, 7 aa, synthetic construct
RDEFVTY

SEQ ID NO: 38455 - protein, 7 aa, synthetic construct
PMGSQTW

SEQ ID NO: 38456 - protein, 7 aa, synthetic construct
STYDSYP

SEQ ID NO: 38457 - protein, 7 aa, synthetic construct
LWDGTSP

SEQ ID NO: 38458 - protein, 7 aa, synthetic construct
YSRIQID

SEQ ID NO: 38459 - protein, 7 aa, synthetic construct
YIKSQSC

SEQ ID NO: 38460 - protein, 7 aa, synthetic construct
YVKSQCS

SEQ ID NO: 38461 - protein, 7 aa, synthetic construct
YHRLSPV

SEQ ID NO: 38462 - protein, 7 aa, synthetic construct
GGEYSTW

SEQ ID NO: 38463 - protein, 7 aa, synthetic construct
YFSGKPN

SEQ ID NO: 38464 - protein, 7 aa, synthetic construct
YSRLSEL

SEQ ID NO: 38465 - protein, 7 aa, synthetic construct
YFAGRME

SEQ ID NO: 38466 - protein, 7 aa, synthetic construct
KDEYKYY

SEQ ID NO: 38467 - protein, 7 aa, synthetic construct
YFTGVRS

SEQ ID NO: 38468 - protein, 7 aa, synthetic construct
GAGTSRW

SEQ ID NO: 38469 - protein, 7 aa, synthetic construct
YFTGRHD

SEQ ID NO: 38470 - protein, 7 aa, synthetic construct
CKPQTAT

SEQ ID NO: 38471 - protein, 7 aa, synthetic construct
CVEGRAP

SEQ ID NO: 38472 - protein, 7 aa, synthetic construct
AGADRGW

SEQ ID NO: 38473 - protein, 7 aa, synthetic construct
VASKGAG

SEQ ID NO: 38474 - protein, 7 aa, synthetic construct
YFSGRID

SEQ ID NO: 38475 - protein, 7 aa, synthetic construct
YFSGTQD

SEQ ID NO: 38476 - protein, 7 aa, synthetic construct
RDEFVKW

SEQ ID NO: 38477 - protein, 7 aa, synthetic construct
YFTNIKE

SEQ ID NO: 38478 - protein, 7 aa, synthetic construct
KEDYTTW

SEQ ID NO: 38479 - protein, 7 aa, synthetic construct
YVKSGPP

SEQ ID NO: 38480 - protein, 7 aa, synthetic construct
YFSGIPH

SEQ ID NO: 38481 - protein, 7 aa, synthetic construct
YFTGEVA

SEQ ID NO: 38482 - protein, 7 aa, synthetic construct
CGSKTGH

SEQ ID NO: 38483 - protein, 7 aa, synthetic construct
YFSGTRD

SEQ ID NO: 38484 - protein, 7 aa, synthetic construct
GVPGVMW

SEQ ID NO: 38485 - protein, 7 aa, synthetic construct
YVKSQGM

SEQ ID NO: 38486 - protein, 7 aa, synthetic construct
MWDGTEA

SEQ ID NO: 38487 - protein, 7 aa, synthetic construct
YARTSIN

SEQ ID NO: 38488 - protein, 7 aa, synthetic construct
YFTGKAQ

SEQ ID NO: 38489 - protein, 7 aa, synthetic construct
YSPGCKE

SEQ ID NO: 38490 - protein, 7 aa, synthetic construct
WWSGITD

SEQ ID NO: 38491 - protein, 7 aa, synthetic construct
KDGYSVY

SEQ ID NO: 38492 - protein, 7 aa, synthetic construct
KDGHSLW

SEQ ID NO: 38493 - protein, 7 aa, synthetic construct
RDAEVYP

SEQ ID NO: 38494 - protein, 7 aa, synthetic construct
LCQPCLT

SEQ ID NO: 38495 - protein, 7 aa, synthetic construct
YFMGKQD

SEQ ID NO: 38496 - protein, 7 aa, synthetic construct
LIRPCSE

SEQ ID NO: 38497 - protein, 7 aa, synthetic construct
CKAPSAG

SEQ ID NO: 38498 - protein, 7 aa, synthetic construct
YVRSDTH

SEQ ID NO: 38499 - protein, 7 aa, synthetic construct
YFTGQRD

SEQ ID NO: 38500 - protein, 7 aa, synthetic construct
GGATSRW

SEQ ID NO: 38501 - protein, 7 aa, synthetic construct
GGPSSTW

SEQ ID NO: 38502 - protein, 7 aa, synthetic construct
IMGKCPG

SEQ ID NO: 38503 - protein, 7 aa, synthetic construct
RDELTSW

SEQ ID NO: 38504 - protein, 7 aa, synthetic construct
RESTHGV

SEQ ID NO: 38505 - protein, 7 aa, synthetic construct
YTRLQTG

SEQ ID NO: 38506 - protein, 7 aa, synthetic construct
ARSTNGV

SEQ ID NO: 38507 - protein, 7 aa, synthetic construct
YHRLSES

SEQ ID NO: 38508 - protein, 7 aa, synthetic construct
YFTNIRE

SEQ ID NO: 38509 - protein, 7 aa, synthetic construct
CKPGAGI

SEQ ID NO: 38510 - protein, 7 aa, synthetic construct
YFSGKQD

SEQ ID NO: 38511 - protein, 7 aa, synthetic construct
YFSGITV

SEQ ID NO: 38512 - protein, 7 aa, synthetic construct
YWTGTTA

SEQ ID NO: 38513 - protein, 7 aa, synthetic construct
LSRLQMN

SEQ ID NO: 38514 - protein, 7 aa, synthetic construct
KDEYLTF

SEQ ID NO: 38515 - protein, 7 aa, synthetic construct
VAREGWD

SEQ ID NO: 38516 - protein, 7 aa, synthetic construct
YGKGTWD

SEQ ID NO: 38517 - protein, 7 aa, synthetic construct
YWTGMLE

SEQ ID NO: 38518 - protein, 7 aa, synthetic construct
MLSDRKW

SEQ ID NO: 38519 - protein, 7 aa, synthetic construct
ARQCLPM

SEQ ID NO: 38520 - protein, 7 aa, synthetic construct
RLDHVFP

SEQ ID NO: 38521 - protein, 7 aa, synthetic construct
YSRCSDN

SEQ ID NO: 38522 - protein, 7 aa, synthetic construct
CKPQSGA

SEQ ID NO: 38523 - protein, 7 aa, synthetic construct
YWSGVID

SEQ ID NO: 38524 - protein, 7 aa, synthetic construct
YFTGQIN

SEQ ID NO: 38525 - protein, 7 aa, synthetic construct
RNEFTGY

SEQ ID NO: 38526 - protein, 7 aa, synthetic construct
ENEFKIF

SEQ ID NO: 38527 - protein, 7 aa, synthetic construct
CTSKTSH

SEQ ID NO: 38528 - protein, 7 aa, synthetic construct
DMGSSQW

SEQ ID NO: 38529 - protein, 7 aa, synthetic construct
TKDGLCA

SEQ ID NO: 38530 - protein, 7 aa, synthetic construct
GSDHVRW

SEQ ID NO: 38531 - protein, 7 aa, synthetic construct
YFSGKTS

SEQ ID NO: 38532 - protein, 7 aa, synthetic construct
YFTGQQS

SEQ ID NO: 38533 - protein, 7 aa, synthetic construct
YFTGFTE

SEQ ID NO: 38534 - protein, 7 aa, synthetic construct
VMEDRRW

SEQ ID NO: 38535 - protein, 7 aa, synthetic construct
RGDRVYP

SEQ ID NO: 38536 - protein, 7 aa, synthetic construct
YFSGQIL

SEQ ID NO: 38537 - protein, 7 aa, synthetic construct
YFTGRQD

SEQ ID NO: 38538 - protein, 7 aa, synthetic construct
YYTGVIE

SEQ ID NO: 38539 - protein, 7 aa, synthetic construct
YSKLDTN

SEQ ID NO: 38540 - protein, 7 aa, synthetic construct
LMSDREW

SEQ ID NO: 38541 - protein, 7 aa, synthetic construct
LARTGRD

SEQ ID NO: 38542 - protein, 7 aa, synthetic construct
HGKGECP

SEQ ID NO: 38543 - protein, 7 aa, synthetic construct
WSRDTCN

SEQ ID NO: 38544 - protein, 7 aa, synthetic construct
GGPGVRW

SEQ ID NO: 38545 - protein, 7 aa, synthetic construct
YSRVQPN

SEQ ID NO: 38546 - protein, 7 aa, synthetic construct
LKDGTCI

SEQ ID NO: 38547 - protein, 7 aa, synthetic construct
YPFPQAA

SEQ ID NO: 38548 - protein, 7 aa, synthetic construct
YFSGVRS

SEQ ID NO: 38549 - protein, 7 aa, synthetic construct
GGEFSKW

SEQ ID NO: 38550 - protein, 7 aa, synthetic construct
CRPKQVD

SEQ ID NO: 38551 - protein, 7 aa, synthetic construct
YFSGTRE

SEQ ID NO: 38552 - protein, 7 aa, synthetic construct
YHRLQED

SEQ ID NO: 38553 - protein, 7 aa, synthetic construct
LWDGTPS

SEQ ID NO: 38554 - protein, 7 aa, synthetic construct
RMDAVTW

SEQ ID NO: 38555 - protein, 7 aa, synthetic construct
NMASTTW

SEQ ID NO: 38556 - protein, 7 aa, synthetic construct
RGESRGW

SEQ ID NO: 38557 - protein, 7 aa, synthetic construct
LLASSSW

SEQ ID NO: 38558 - protein, 7 aa, synthetic construct
IPSSVRW

SEQ ID NO: 38559 - protein, 7 aa, synthetic construct
RDDFSVY

SEQ ID NO: 38560 - protein, 7 aa, synthetic construct
LRDGSPA

SEQ ID NO: 38561 - protein, 7 aa, synthetic construct
YWAGVRE

SEQ ID NO: 38562 - protein, 7 aa, synthetic construct
WWSGVAE

SEQ ID NO: 38563 - protein, 7 aa, synthetic construct
KYDHVTW

SEQ ID NO: 38564 - protein, 7 aa, synthetic construct
YFSGVPH

SEQ ID NO: 38565 - protein, 7 aa, synthetic construct
YVRSDAT

SEQ ID NO: 38566 - protein, 7 aa, synthetic construct
RDEFHAW

SEQ ID NO: 38567 - protein, 7 aa, synthetic construct
YFSGTQA

SEQ ID NO: 38568 - protein, 7 aa, synthetic construct
GSEMSHW

SEQ ID NO: 38569 - protein, 7 aa, synthetic construct
YARTSPL

SEQ ID NO: 38570 - protein, 7 aa, synthetic construct
CKPEMVR

SEQ ID NO: 38571 - protein, 7 aa, synthetic construct
RTYDAYP

SEQ ID NO: 38572 - protein, 7 aa, synthetic construct
MWDGTPS

SEQ ID NO: 38573 - protein, 7 aa, synthetic construct
CSRDGEN

SEQ ID NO: 38574 - protein, 7 aa, synthetic construct
YYTGRME

SEQ ID NO: 38575 - protein, 7 aa, synthetic construct
DMESSKW

SEQ ID NO: 38576 - protein, 7 aa, synthetic construct
GSEYLTW

SEQ ID NO: 38577 - protein, 7 aa, synthetic construct
YTRLDSH

SEQ ID NO: 38578 - protein, 7 aa, synthetic construct
RNDFVSF

SEQ ID NO: 38579 - protein, 7 aa, synthetic construct
REDFSTW

SEQ ID NO: 38580 - protein, 7 aa, synthetic construct
GSGTSHW

SEQ ID NO: 38581 - protein, 7 aa, synthetic construct
CKPRQGE

SEQ ID NO: 38582 - protein, 7 aa, synthetic construct
RNEFSTY

SEQ ID NO: 38583 - protein, 7 aa, synthetic construct
YYTGKCN

SEQ ID NO: 38584 - protein, 7 aa, synthetic construct
KTDYVTW

SEQ ID NO: 38585 - protein, 7 aa, synthetic construct
YFAGTIN

SEQ ID NO: 38586 - protein, 7 aa, synthetic construct
YFSGRLD

SEQ ID NO: 38587 - protein, 7 aa, synthetic construct
YFAGIIG

SEQ ID NO: 38588 - protein, 7 aa, synthetic construct
YSRLNEF

SEQ ID NO: 38589 - protein, 7 aa, synthetic construct
YSRIGFD

SEQ ID NO: 38590 - protein, 7 aa, synthetic construct
RDETSYW

SEQ ID NO: 38591 - protein, 7 aa, synthetic construct
RDGTSRW

SEQ ID NO: 38592 - protein, 7 aa, synthetic construct
YSRAGMD

SEQ ID NO: 38593 - protein, 7 aa, synthetic construct
RDGSSRW

SEQ ID NO: 38594 - protein, 7 aa, synthetic construct
MMDGTPA

SEQ ID NO: 38595 - protein, 7 aa, synthetic construct
YSRIQFD

SEQ ID NO: 38596 - protein, 7 aa, synthetic construct
CKSNNEP

SEQ ID NO: 38597 - protein, 7 aa, synthetic construct
RDEVTSW

SEQ ID NO: 38598 - protein, 7 aa, synthetic construct
KYAFSTE

SEQ ID NO: 38599 - protein, 7 aa, synthetic construct
DLDSYKW

SEQ ID NO: 38600 - protein, 7 aa, synthetic construct
CGAKCCP

SEQ ID NO: 38601 - protein, 7 aa, synthetic construct
WSRDCDN

SEQ ID NO: 38602 - protein, 7 aa, synthetic construct
YSRIQDD

SEQ ID NO: 38603 - protein, 7 aa, synthetic construct
RDGISAW

SEQ ID NO: 38604 - protein, 7 aa, synthetic construct
YFSGIHN

SEQ ID NO: 38605 - protein, 7 aa, synthetic construct
RGDSPKW

SEQ ID NO: 38606 - protein, 7 aa, synthetic construct
YFSGQSE

SEQ ID NO: 38607 - protein, 7 aa, synthetic construct
YFSGMRE

SEQ ID NO: 38608 - protein, 7 aa, synthetic construct
RLESYDW

SEQ ID NO: 38609 - protein, 7 aa, synthetic construct
IEGRGWD

SEQ ID NO: 38610 - protein, 7 aa, synthetic construct
RMEDRKW

SEQ ID NO: 38611 - protein, 7 aa, synthetic construct
YSRVQLN

SEQ ID NO: 38612 - protein, 7 aa, synthetic construct
YSRIQMD

SEQ ID NO: 38613 - protein, 7 aa, synthetic construct
CQGQGNP

SEQ ID NO: 38614 - protein, 7 aa, synthetic construct
YSRIAPD

SEQ ID NO: 38615 - protein, 7 aa, synthetic construct
YHRLSAD

SEQ ID NO: 38616 - protein, 7 aa, synthetic construct
NLESRGW

SEQ ID NO: 38617 - protein, 7 aa, synthetic construct
CGKMCCP

SEQ ID NO: 38618 - protein, 7 aa, synthetic construct
YWTGTVD

SEQ ID NO: 38619 - protein, 7 aa, synthetic construct
YFHGKKD

SEQ ID NO: 38620 - protein, 7 aa, synthetic construct
YSRLSEN

SEQ ID NO: 38621 - protein, 7 aa, synthetic construct
RSPDVYP

SEQ ID NO: 38622 - protein, 7 aa, synthetic construct
GCYKGPP

SEQ ID NO: 38623 - protein, 7 aa, synthetic construct
RESDNGI

SEQ ID NO: 38624 - protein, 7 aa, synthetic construct
WCREGTP

SEQ ID NO: 38625 - protein, 7 aa, synthetic construct
YTHSNKF

SEQ ID NO: 38626 - protein, 7 aa, synthetic construct
LHRLSNG

SEQ ID NO: 38627 - protein, 7 aa, synthetic construct
YFSGVQD

SEQ ID NO: 38628 - protein, 7 aa, synthetic construct
CDGSHKA

SEQ ID NO: 38629 - protein, 7 aa, synthetic construct
YARTSPM

SEQ ID NO: 38630 - protein, 7 aa, synthetic construct
YSRLQSD

SEQ ID NO: 38631 - protein, 7 aa, synthetic construct
YSRIQLN

SEQ ID NO: 38632 - protein, 7 aa, synthetic construct
YHKHGPQ

SEQ ID NO: 38633 - protein, 7 aa, synthetic construct
YVKSDGS

SEQ ID NO: 38634 - protein, 7 aa, synthetic construct
FFTGTYD

SEQ ID NO: 38635 - protein, 7 aa, synthetic construct
YFSGVMQ

SEQ ID NO: 38636 - protein, 7 aa, synthetic construct
CKPGMGP

SEQ ID NO: 38637 - protein, 7 aa, synthetic construct
RDGASTW

SEQ ID NO: 38638 - protein, 7 aa, synthetic construct
YVRSDNR

SEQ ID NO: 38639 - protein, 7 aa, synthetic construct
DMYVGSC

SEQ ID NO: 38640 - protein, 7 aa, synthetic construct
KNDYTVF

SEQ ID NO: 38641 - protein, 7 aa, synthetic construct
CKMPMRD

SEQ ID NO: 38642 - protein, 7 aa, synthetic construct
PYARSPA

SEQ ID NO: 38643 - protein, 7 aa, synthetic construct
YFSGTLS

SEQ ID NO: 38644 - protein, 7 aa, synthetic construct
CKLQPPP

SEQ ID NO: 38645 - protein, 7 aa, synthetic construct
YPSGGPG

SEQ ID NO: 38646 - protein, 7 aa, synthetic construct
SDGVSLW

SEQ ID NO: 38647 - protein, 7 aa, synthetic construct
MSEFVSF

SEQ ID NO: 38648 - protein, 7 aa, synthetic construct
KEDSRTW

SEQ ID NO: 38649 - protein, 7 aa, synthetic construct
CAPYVHE

SEQ ID NO: 38650 - protein, 7 aa, synthetic construct
PYARSPM

SEQ ID NO: 38651 - protein, 7 aa, synthetic construct
FTRLSIN

SEQ ID NO: 38652 - protein, 7 aa, synthetic construct
LHKLQVY

SEQ ID NO: 38653 - protein, 7 aa, synthetic construct
VSEFQSY

SEQ ID NO: 38654 - protein, 7 aa, synthetic construct
YSRISPN

SEQ ID NO: 38655 - protein, 7 aa, synthetic construct
RSEFAVY

SEQ ID NO: 38656 - protein, 7 aa, synthetic construct
YFTGVTG

SEQ ID NO: 38657 - protein, 7 aa, synthetic construct
YFSGRLL

SEQ ID NO: 38658 - protein, 7 aa, synthetic construct
YWSGVTD

SEQ ID NO: 38659 - protein, 7 aa, synthetic construct
YFEGRVD

SEQ ID NO: 38660 - protein, 7 aa, synthetic construct
ILDSRKW

SEQ ID NO: 38661 - protein, 7 aa, synthetic construct
YEPGCKV

SEQ ID NO: 38662 - protein, 7 aa, synthetic construct
YFQGRIE

SEQ ID NO: 38663 - protein, 7 aa, synthetic construct
CRTGQPA

SEQ ID NO: 38664 - protein, 7 aa, synthetic construct
FFSGIME

SEQ ID NO: 38665 - protein, 7 aa, synthetic construct
DLRSKTW

SEQ ID NO: 38666 - protein, 7 aa, synthetic construct
NMSSRGW

SEQ ID NO: 38667 - protein, 7 aa, synthetic construct
YFSGTIQ

SEQ ID NO: 38668 - protein, 7 aa, synthetic construct
RGEFVMF

SEQ ID NO: 38669 - protein, 7 aa, synthetic construct
YFSGRSE

SEQ ID NO: 38670 - protein, 7 aa, synthetic construct
LWDGTMA

SEQ ID NO: 38671 - protein, 7 aa, synthetic construct
VDEWLPF

SEQ ID NO: 38672 - protein, 7 aa, synthetic construct
LCRPCSM

SEQ ID NO: 38673 - protein, 7 aa, synthetic construct
YFSGKQS

SEQ ID NO: 38674 - protein, 7 aa, synthetic construct
GVETVRW

SEQ ID NO: 38675 - protein, 7 aa, synthetic construct
LCRPLSE

SEQ ID NO: 38676 - protein, 7 aa, synthetic construct
YFHGKQE

SEQ ID NO: 38677 - protein, 7 aa, synthetic construct
YFTGKPE

SEQ ID NO: 38678 - protein, 7 aa, synthetic construct
YFSGTVM

SEQ ID NO: 38679 - protein, 7 aa, synthetic construct
YFSGKIT

SEQ ID NO: 38680 - protein, 7 aa, synthetic construct
YFSGQNE

SEQ ID NO: 38681 - protein, 7 aa, synthetic construct
YSSIGPN

SEQ ID NO: 38682 - protein, 7 aa, synthetic construct
TDGYSSW

SEQ ID NO: 38683 - protein, 7 aa, synthetic construct
CNKPTTA

SEQ ID NO: 38684 - protein, 7 aa, synthetic construct
PCGKPPP

SEQ ID NO: 38685 - protein, 7 aa, synthetic construct
DMTDRKW

SEQ ID NO: 38686 - protein, 7 aa, synthetic construct
CAPDYRP

SEQ ID NO: 38687 - protein, 7 aa, synthetic construct
YYTGKIS

SEQ ID NO: 38688 - protein, 7 aa, synthetic construct
CKPPSDY

SEQ ID NO: 38689 - protein, 7 aa, synthetic construct
DLRDRTW

SEQ ID NO: 38690 - protein, 7 aa, synthetic construct
RTFDAYP

SEQ ID NO: 38691 - protein, 7 aa, synthetic construct
FFTGKIE

SEQ ID NO: 38692 - protein, 7 aa, synthetic construct
GDGSSRW

SEQ ID NO: 38693 - protein, 7 aa, synthetic construct
DLQSIKW

SEQ ID NO: 38694 - protein, 7 aa, synthetic construct
YFTGKVG

SEQ ID NO: 38695 - protein, 7 aa, synthetic construct
YSRIGPG

SEQ ID NO: 38696 - protein, 7 aa, synthetic construct
YFSGQTD

SEQ ID NO: 38697 - protein, 7 aa, synthetic construct
MWDGTMA

SEQ ID NO: 38698 - protein, 7 aa, synthetic construct
YYTGIVS

SEQ ID NO: 38699 - protein, 7 aa, synthetic construct
YFAGKHE

SEQ ID NO: 38700 - protein, 7 aa, synthetic construct
YFSGQLA

SEQ ID NO: 38701 - protein, 7 aa, synthetic construct
YFHGQVA

SEQ ID NO: 38702 - protein, 7 aa, synthetic construct
MWDGTIA

SEQ ID NO: 38703 - protein, 7 aa, synthetic construct
YARMGPD

SEQ ID NO: 38704 - protein, 7 aa, synthetic construct
GGATSHW

SEQ ID NO: 38705 - protein, 7 aa, synthetic construct
RPDTVRW

SEQ ID NO: 38706 - protein, 7 aa, synthetic construct
FFSGQVD

SEQ ID NO: 38707 - protein, 7 aa, synthetic construct
GSEFKVF

SEQ ID NO: 38708 - protein, 7 aa, synthetic construct
YVRSQTS

SEQ ID NO: 38709 - protein, 7 aa, synthetic construct
GCRHGTI

SEQ ID NO: 38710 - protein, 7 aa, synthetic construct
GSEFMSY

SEQ ID NO: 38711 - protein, 7 aa, synthetic construct
DLRAANW

SEQ ID NO: 38712 - protein, 7 aa, synthetic construct
YHRLSEN

SEQ ID NO: 38713 - protein, 7 aa, synthetic construct
WWTGIAD

SEQ ID NO: 38714 - protein, 7 aa, synthetic construct
YFTGRTD

SEQ ID NO: 38715 - protein, 7 aa, synthetic construct
YFAGVKG

SEQ ID NO: 38716 - protein, 7 aa, synthetic construct
CKEGVRW

SEQ ID NO: 38717 - protein, 7 aa, synthetic construct
LARSAPD

SEQ ID NO: 38718 - protein, 7 aa, synthetic construct
YHRLSQD

SEQ ID NO: 38719 - protein, 7 aa, synthetic construct
YVRSDSR

SEQ ID NO: 38720 - protein, 7 aa, synthetic construct
FSVYTGS

SEQ ID NO: 38721 - protein, 7 aa, synthetic construct
VAPKCAE

SEQ ID NO: 38722 - protein, 7 aa, synthetic construct
RDDFSLW

SEQ ID NO: 38723 - protein, 7 aa, synthetic construct
YWSGTID

SEQ ID NO: 38724 - protein, 7 aa, synthetic construct
YSRLNYD

SEQ ID NO: 38725 - protein, 7 aa, synthetic construct
VPDFVRY

SEQ ID NO: 38726 - protein, 7 aa, synthetic construct
YHKYNVN

SEQ ID NO: 38727 - protein, 7 aa, synthetic construct
YSRLHAN

SEQ ID NO: 38728 - protein, 7 aa, synthetic construct
CIGECCP

SEQ ID NO: 38729 - protein, 7 aa, synthetic construct
HDGVSKW

SEQ ID NO: 38730 - protein, 7 aa, synthetic construct
YFTGKIG

SEQ ID NO: 38731 - protein, 7 aa, synthetic construct
YWSGVRE

SEQ ID NO: 38732 - protein, 7 aa, synthetic construct
YFSGVRV

SEQ ID NO: 38733 - protein, 7 aa, synthetic construct
CTSATGH

SEQ ID NO: 38734 - protein, 7 aa, synthetic construct
CKEKCCE

SEQ ID NO: 38735 - protein, 7 aa, synthetic construct
FPGSCKE

SEQ ID NO: 38736 - protein, 7 aa, synthetic construct
RDADVYP

SEQ ID NO: 38737 - protein, 7 aa, synthetic construct
CASKTGH

SEQ ID NO: 38738 - protein, 7 aa, synthetic construct
CRPNTHP

SEQ ID NO: 38739 - protein, 7 aa, synthetic construct
YFSGVKI

SEQ ID NO: 38740 - protein, 7 aa, synthetic construct
YWSGTVA

SEQ ID NO: 38741 - protein, 7 aa, synthetic construct
KSDFTSY

SEQ ID NO: 38742 - protein, 7 aa, synthetic construct
VSTHCYA

SEQ ID NO: 38743 - protein, 7 aa, synthetic construct
YYSGVLA

SEQ ID NO: 38744 - protein, 7 aa, synthetic construct
RDGQSSW

SEQ ID NO: 38745 - protein, 7 aa, synthetic construct
YSRAGFD

SEQ ID NO: 38746 - protein, 7 aa, synthetic construct
CKSEHVR

SEQ ID NO: 38747 - protein, 7 aa, synthetic construct
KVDHVRW

SEQ ID NO: 38748 - protein, 7 aa, synthetic construct
YFSGVRA

SEQ ID NO: 38749 - protein, 7 aa, synthetic construct
YFTGQCE

SEQ ID NO: 38750 - protein, 7 aa, synthetic construct
RSEFHGY

SEQ ID NO: 38751 - protein, 7 aa, synthetic construct
LHRLSMG

SEQ ID NO: 38752 - protein, 7 aa, synthetic construct
IMPSRNW

SEQ ID NO: 38753 - protein, 7 aa, synthetic construct
YHRLSDN

SEQ ID NO: 38754 - protein, 7 aa, synthetic construct
FFSGVTA

SEQ ID NO: 38755 - protein, 7 aa, synthetic construct
RTPTTFP

SEQ ID NO: 38756 - protein, 7 aa, synthetic construct
VMSSRTW

SEQ ID NO: 38757 - protein, 7 aa, synthetic construct
YWAGIRE

SEQ ID NO: 38758 - protein, 7 aa, synthetic construct
WLKSQPG

SEQ ID NO: 38759 - protein, 7 aa, synthetic construct
YSRLSPA

SEQ ID NO: 38760 - protein, 7 aa, synthetic construct
MHRLTMD

SEQ ID NO: 38761 - protein, 7 aa, synthetic construct
REEWVAY

SEQ ID NO: 38762 - protein, 7 aa, synthetic construct
YFTGVRN

SEQ ID NO: 38763 - protein, 7 aa, synthetic construct
YWSKVQA

SEQ ID NO: 38764 - protein, 7 aa, synthetic construct
YHRLGDN

SEQ ID NO: 38765 - protein, 7 aa, synthetic construct
RGGTSAW

SEQ ID NO: 38766 - protein, 7 aa, synthetic construct
YLHSQSY

SEQ ID NO: 38767 - protein, 7 aa, synthetic construct
DMGSAAW

SEQ ID NO: 38768 - protein, 7 aa, synthetic construct
CKATEVS

SEQ ID NO: 38769 - protein, 7 aa, synthetic construct
YFSGVHK

SEQ ID NO: 38770 - protein, 7 aa, synthetic construct
YFTGEVS

SEQ ID NO: 38771 - protein, 7 aa, synthetic construct
FARMNCN

SEQ ID NO: 38772 - protein, 7 aa, synthetic construct
KDGYSGW

SEQ ID NO: 38773 - protein, 7 aa, synthetic construct
REDSSRW

SEQ ID NO: 38774 - protein, 7 aa, synthetic construct
YVRSGCG

SEQ ID NO: 38775 - protein, 7 aa, synthetic construct
SLESRAW

SEQ ID NO: 38776 - protein, 7 aa, synthetic construct
CKGDKHG

SEQ ID NO: 38777 - protein, 7 aa, synthetic construct
YFSGILP

SEQ ID NO: 38778 - protein, 7 aa, synthetic construct
YVRSQPI

SEQ ID NO: 38779 - protein, 7 aa, synthetic construct
CYKKLPD

SEQ ID NO: 38780 - protein, 7 aa, synthetic construct
RDGYSAW

SEQ ID NO: 38781 - protein, 7 aa, synthetic construct
PFARSVE

SEQ ID NO: 38782 - protein, 7 aa, synthetic construct
REDWVQF

SEQ ID NO: 38783 - protein, 7 aa, synthetic construct
YFHGRLE

SEQ ID NO: 38784 - protein, 7 aa, synthetic construct
YYTGITE

SEQ ID NO: 38785 - protein, 7 aa, synthetic construct
RDLDVYP

SEQ ID NO: 38786 - protein, 7 aa, synthetic construct
GVTAVKW

SEQ ID NO: 38787 - protein, 7 aa, synthetic construct
RDGMSSW

SEQ ID NO: 38788 - protein, 7 aa, synthetic construct
YFTGVTN

SEQ ID NO: 38789 - protein, 7 aa, synthetic construct
LMRPCSE

SEQ ID NO: 38790 - protein, 7 aa, synthetic construct
FSRLSIN

SEQ ID NO: 38791 - protein, 7 aa, synthetic construct
CTSKTGT

SEQ ID NO: 38792 - protein, 7 aa, synthetic construct
LSRAQFN

SEQ ID NO: 38793 - protein, 7 aa, synthetic construct
RSEYTTF

SEQ ID NO: 38794 - protein, 7 aa, synthetic construct
MWDGTAA

SEQ ID NO: 38795 - protein, 7 aa, synthetic construct
YVRSDTT

SEQ ID NO: 38796 - protein, 7 aa, synthetic construct
YWTGKVD

SEQ ID NO: 38797 - protein, 7 aa, synthetic construct
FFSGRVE

SEQ ID NO: 38798 - protein, 7 aa, synthetic construct
MDGNSRW

SEQ ID NO: 38799 - protein, 7 aa, synthetic construct
YVKSCPL

SEQ ID NO: 38800 - protein, 7 aa, synthetic construct
YWQGVKE

SEQ ID NO: 38801 - protein, 7 aa, synthetic construct
WWSGTRE

SEQ ID NO: 38802 - protein, 7 aa, synthetic construct
RLDHVYP

SEQ ID NO: 38803 - protein, 7 aa, synthetic construct
YFAGVRS

SEQ ID NO: 38804 - protein, 7 aa, synthetic construct
CKPYSRE

SEQ ID NO: 38805 - protein, 7 aa, synthetic construct
WTPGCKA

SEQ ID NO: 38806 - protein, 7 aa, synthetic construct
KDEWKTY

SEQ ID NO: 38807 - protein, 7 aa, synthetic construct
YVRSQMG

SEQ ID NO: 38808 - protein, 7 aa, synthetic construct
YVRSDKA

SEQ ID NO: 38809 - protein, 7 aa, synthetic construct
RTNNVYP

SEQ ID NO: 38810 - protein, 7 aa, synthetic construct
FFSGKIE

SEQ ID NO: 38811 - protein, 7 aa, synthetic construct
CKPAPGE

SEQ ID NO: 38812 - protein, 7 aa, synthetic construct
APETIRW

SEQ ID NO: 38813 - protein, 7 aa, synthetic construct
FMTGKCP

SEQ ID NO: 38814 - protein, 7 aa, synthetic construct
APPHIKW

SEQ ID NO: 38815 - protein, 7 aa, synthetic construct
DLRDRKW

SEQ ID NO: 38816 - protein, 7 aa, synthetic construct
YVKSQGS

SEQ ID NO: 38817 - protein, 7 aa, synthetic construct
YSRLHAV

SEQ ID NO: 38818 - protein, 7 aa, synthetic construct
LHRLSEY

SEQ ID NO: 38819 - protein, 7 aa, synthetic construct
YWTGVTD

SEQ ID NO: 38820 - protein, 7 aa, synthetic construct
YSRLSDV

SEQ ID NO: 38821 - protein, 7 aa, synthetic construct
RESSVRW

SEQ ID NO: 38822 - protein, 7 aa, synthetic construct
REEEVAW

SEQ ID NO: 38823 - protein, 7 aa, synthetic construct
CKEGSAW

SEQ ID NO: 38824 - protein, 7 aa, synthetic construct
SMADRSW

SEQ ID NO: 38825 - protein, 7 aa, synthetic construct
RDEFRSW

SEQ ID NO: 38826 - protein, 7 aa, synthetic construct
RDEFKVW

SEQ ID NO: 38827 - protein, 7 aa, synthetic construct
YHRLSIN

SEQ ID NO: 38828 - protein, 7 aa, synthetic construct
GSDFVRW

SEQ ID NO: 38829 - protein, 7 aa, synthetic construct
YWTGMIS

SEQ ID NO: 38830 - protein, 7 aa, synthetic construct
CRPQTPL

SEQ ID NO: 38831 - protein, 7 aa, synthetic construct
HMPDRKW

SEQ ID NO: 38832 - protein, 7 aa, synthetic construct
YSRLSPT

SEQ ID NO: 38833 - protein, 7 aa, synthetic construct
RPESVRW

SEQ ID NO: 38834 - protein, 7 aa, synthetic construct
RDEYMSW

SEQ ID NO: 38835 - protein, 7 aa, synthetic construct
RDEFRSY

SEQ ID NO: 38836 - protein, 7 aa, synthetic construct
IGGRCPP

SEQ ID NO: 38837 - protein, 7 aa, synthetic construct
DPSSVRW

SEQ ID NO: 38838 - protein, 7 aa, synthetic construct
LSKSAYN

SEQ ID NO: 38839 - protein, 7 aa, synthetic construct
WWSAVPE

SEQ ID NO: 38840 - protein, 7 aa, synthetic construct
ENASRAW

SEQ ID NO: 38841 - protein, 7 aa, synthetic construct
VSTHCTA

SEQ ID NO: 38842 - protein, 7 aa, synthetic construct
CKPPSGD

SEQ ID NO: 38843 - protein, 7 aa, synthetic construct
YHRLSAN

SEQ ID NO: 38844 - protein, 7 aa, synthetic construct
CPQKGQE

SEQ ID NO: 38845 - protein, 7 aa, synthetic construct
PLSDRTW

SEQ ID NO: 38846 - protein, 7 aa, synthetic construct
RDATSGW

SEQ ID NO: 38847 - protein, 7 aa, synthetic construct
YFTKQIN

SEQ ID NO: 38848 - protein, 7 aa, synthetic construct
HTPMCKA

SEQ ID NO: 38849 - protein, 7 aa, synthetic construct
YFTGREN

SEQ ID NO: 38850 - protein, 7 aa, synthetic construct
YHKSQNF

SEQ ID NO: 38851 - protein, 7 aa, synthetic construct
CKLPKEL

SEQ ID NO: 38852 - protein, 7 aa, synthetic construct
VSTHCAA

SEQ ID NO: 38853 - protein, 7 aa, synthetic construct
RMPDRGW

SEQ ID NO: 38854 - protein, 7 aa, synthetic construct
PYARSPL

SEQ ID NO: 38855 - protein, 7 aa, synthetic construct
TRQGDPA

SEQ ID NO: 38856 - protein, 7 aa, synthetic construct
YHRMSPD

SEQ ID NO: 38857 - protein, 7 aa, synthetic construct
DLGSSVW

SEQ ID NO: 38858 - protein, 7 aa, synthetic construct
GDEWQHF

SEQ ID NO: 38859 - protein, 7 aa, synthetic construct
GGPTMCY

SEQ ID NO: 38860 - protein, 7 aa, synthetic construct
VPGHCLV

SEQ ID NO: 38861 - protein, 7 aa, synthetic construct
PYARSIE

SEQ ID NO: 38862 - protein, 7 aa, synthetic construct
YHRLGDP

SEQ ID NO: 38863 - protein, 7 aa, synthetic construct
YSRLQSN

SEQ ID NO: 38864 - protein, 7 aa, synthetic construct
YFTGRED

SEQ ID NO: 38865 - protein, 7 aa, synthetic construct
YWQGIKD

SEQ ID NO: 38866 - protein, 7 aa, synthetic construct
YFTGVAV

SEQ ID NO: 38867 - protein, 7 aa, synthetic construct
GVEAVRW

SEQ ID NO: 38868 - protein, 7 aa, synthetic construct
SMSDRTW

SEQ ID NO: 38869 - protein, 7 aa, synthetic construct
YSRIQTD

SEQ ID NO: 38870 - protein, 7 aa, synthetic construct
GSEFSTY

SEQ ID NO: 38871 - protein, 7 aa, synthetic construct
YFSKIAA

SEQ ID NO: 38872 - protein, 7 aa, synthetic construct
RDDYVSW

SEQ ID NO: 38873 - protein, 7 aa, synthetic construct
QMKDRTW

SEQ ID NO: 38874 - protein, 7 aa, synthetic construct
YSRLQPV

SEQ ID NO: 38875 - protein, 7 aa, synthetic construct
FSRVSDN

SEQ ID NO: 38876 - protein, 7 aa, synthetic construct
MMDGTNA

SEQ ID NO: 38877 - protein, 7 aa, synthetic construct
AMADREW

SEQ ID NO: 38878 - protein, 7 aa, synthetic construct
CKQPKTE

SEQ ID NO: 38879 - protein, 7 aa, synthetic construct
FFTGYKE

SEQ ID NO: 38880 - protein, 7 aa, synthetic construct
RMEDRQW

SEQ ID NO: 38881 - protein, 7 aa, synthetic construct
LHRLGEG

SEQ ID NO: 38882 - protein, 7 aa, synthetic construct
YSRLSYD

SEQ ID NO: 38883 - protein, 7 aa, synthetic construct
VMQDRTW

SEQ ID NO: 38884 - protein, 7 aa, synthetic construct
YWTGVHD

SEQ ID NO: 38885 - protein, 7 aa, synthetic construct
YHRLSDH

SEQ ID NO: 38886 - protein, 7 aa, synthetic construct
KYDHVAW

SEQ ID NO: 38887 - protein, 7 aa, synthetic construct
WTPMCKN

SEQ ID NO: 38888 - protein, 7 aa, synthetic construct
YFSGRIQ

SEQ ID NO: 38889 - protein, 7 aa, synthetic construct
YFSGIHL

SEQ ID NO: 38890 - protein, 7 aa, synthetic construct
RTREVYP

SEQ ID NO: 38891 - protein, 7 aa, synthetic construct
YFSGHHE

SEQ ID NO: 38892 - protein, 7 aa, synthetic construct
YFTGFLE

SEQ ID NO: 38893 - protein, 7 aa, synthetic construct
CKPDEVR

SEQ ID NO: 38894 - protein, 7 aa, synthetic construct
LARTGCD

SEQ ID NO: 38895 - protein, 7 aa, synthetic construct
CAGYLHE

SEQ ID NO: 38896 - protein, 7 aa, synthetic construct
CGGGRLP

SEQ ID NO: 38897 - protein, 7 aa, synthetic construct
YYSGITA

SEQ ID NO: 38898 - protein, 7 aa, synthetic construct
RAYDAFP

SEQ ID NO: 38899 - protein, 7 aa, synthetic construct
RGEFSTW

SEQ ID NO: 38900 - protein, 7 aa, synthetic construct
YFSQIKE

SEQ ID NO: 38901 - protein, 7 aa, synthetic construct
YFTGTLQ

SEQ ID NO: 38902 - protein, 7 aa, synthetic construct
LDGTSRW

SEQ ID NO: 38903 - protein, 7 aa, synthetic construct
YESTNGR

SEQ ID NO: 38904 - protein, 7 aa, synthetic construct
YLKSQGY

SEQ ID NO: 38905 - protein, 7 aa, synthetic construct
YFAGILA

SEQ ID NO: 38906 - protein, 7 aa, synthetic construct
YFSGKRE

SEQ ID NO: 38907 - protein, 7 aa, synthetic construct
YFHGQID

SEQ ID NO: 38908 - protein, 7 aa, synthetic construct
KLTDRTW

SEQ ID NO: 38909 - protein, 7 aa, synthetic construct
CKPPSPM

SEQ ID NO: 38910 - protein, 7 aa, synthetic construct
YFTGVLP

SEQ ID NO: 38911 - protein, 7 aa, synthetic construct
TWEGDAA

SEQ ID NO: 38912 - protein, 7 aa, synthetic construct
PLSSQSW

SEQ ID NO: 38913 - protein, 7 aa, synthetic construct
YSRLGPV

SEQ ID NO: 38914 - protein, 7 aa, synthetic construct
YSRLQER

SEQ ID NO: 38915 - protein, 7 aa, synthetic construct
RLESQVW

SEQ ID NO: 38916 - protein, 7 aa, synthetic construct
CKPEMLR

SEQ ID NO: 38917 - protein, 7 aa, synthetic construct
YSKWNVN

SEQ ID NO: 38918 - protein, 7 aa, synthetic construct
CKPAQGS

SEQ ID NO: 38919 - protein, 7 aa, synthetic construct
YGATKCD

SEQ ID NO: 38920 - protein, 7 aa, synthetic construct
YFSGQQD

SEQ ID NO: 38921 - protein, 7 aa, synthetic construct
WCRSQAG

SEQ ID NO: 38922 - protein, 7 aa, synthetic construct
GCRHGDM

SEQ ID NO: 38923 - protein, 7 aa, synthetic construct
CMPPSKE

SEQ ID NO: 38924 - protein, 7 aa, synthetic construct
KGLEGMD

SEQ ID NO: 38925 - protein, 7 aa, synthetic construct
TCIAPDR

SEQ ID NO: 38926 - protein, 7 aa, synthetic construct
YSRIQVD

SEQ ID NO: 38927 - protein, 7 aa, synthetic construct
YWSKVME

SEQ ID NO: 38928 - protein, 7 aa, synthetic construct
GDEWIHF

SEQ ID NO: 38929 - protein, 7 aa, synthetic construct
SDFTCRE

SEQ ID NO: 38930 - protein, 7 aa, synthetic construct
CKDEYRV

SEQ ID NO: 38931 - protein, 7 aa, synthetic construct
PMESKKW

SEQ ID NO: 38932 - protein, 7 aa, synthetic construct
CTSRTGH

SEQ ID NO: 38933 - protein, 7 aa, synthetic construct
ARSTNGI

SEQ ID NO: 38934 - protein, 7 aa, synthetic construct
VMSDRRW

SEQ ID NO: 38935 - protein, 7 aa, synthetic construct
YHKLNIT

SEQ ID NO: 38936 - protein, 7 aa, synthetic construct
FWSGIKE

SEQ ID NO: 38937 - protein, 7 aa, synthetic construct
RQSTNGI

SEQ ID NO: 38938 - protein, 7 aa, synthetic construct
YYTGILE

SEQ ID NO: 38939 - protein, 7 aa, synthetic construct
YFTGRLV

SEQ ID NO: 38940 - protein, 7 aa, synthetic construct
YYTGKVS

SEQ ID NO: 38941 - protein, 7 aa, synthetic construct
YFSGVTN

SEQ ID NO: 38942 - protein, 7 aa, synthetic construct
CKPQSGW

SEQ ID NO: 38943 - protein, 7 aa, synthetic construct
YSRIQAD

SEQ ID NO: 38944 - protein, 7 aa, synthetic construct
QDGYSKY

SEQ ID NO: 38945 - protein, 7 aa, synthetic construct
YSKLSDL

SEQ ID NO: 38946 - protein, 7 aa, synthetic construct
YYTGRVD

SEQ ID NO: 38947 - protein, 7 aa, synthetic construct
REEFTTW

SEQ ID NO: 38948 - protein, 7 aa, synthetic construct
CKRQSEW

SEQ ID NO: 38949 - protein, 7 aa, synthetic construct
GCGTKPG

SEQ ID NO: 38950 - protein, 7 aa, synthetic construct
YYTGVKN

SEQ ID NO: 38951 - protein, 7 aa, synthetic construct
YYTGVMA

SEQ ID NO: 38952 - protein, 7 aa, synthetic construct
YSTNCKS

SEQ ID NO: 38953 - protein, 7 aa, synthetic construct
YFSGVTR

SEQ ID NO: 38954 - protein, 7 aa, synthetic construct
YSRLNGL

SEQ ID NO: 38955 - protein, 7 aa, synthetic construct
ELSSIKW

SEQ ID NO: 38956 - protein, 7 aa, synthetic construct
PMSVSKW

SEQ ID NO: 38957 - protein, 7 aa, synthetic construct
YHRLGGD

SEQ ID NO: 38958 - protein, 7 aa, synthetic construct
YFSGKSS

SEQ ID NO: 38959 - protein, 7 aa, synthetic construct
CAPDYRQ

SEQ ID NO: 38960 - protein, 7 aa, synthetic construct
RDEFEHW

SEQ ID NO: 38961 - protein, 7 aa, synthetic construct
KDGYSLY

SEQ ID NO: 38962 - protein, 7 aa, synthetic construct
IAYDAYP

SEQ ID NO: 38963 - protein, 7 aa, synthetic construct
DMGASSW

SEQ ID NO: 38964 - protein, 7 aa, synthetic construct
ILESRDW

SEQ ID NO: 38965 - protein, 7 aa, synthetic construct
SMQDRFW

SEQ ID NO: 38966 - protein, 7 aa, synthetic construct
RDEFRTY

SEQ ID NO: 38967 - protein, 7 aa, synthetic construct
YSRIGPH

SEQ ID NO: 38968 - protein, 7 aa, synthetic construct
IMSERVW

SEQ ID NO: 38969 - protein, 7 aa, synthetic construct
YAKQSRN

SEQ ID NO: 38970 - protein, 7 aa, synthetic construct
CKPDALR

SEQ ID NO: 38971 - protein, 7 aa, synthetic construct
YSRIGCN

SEQ ID NO: 38972 - protein, 7 aa, synthetic construct
VMEDRNW

SEQ ID NO: 38973 - protein, 7 aa, synthetic construct
CKKDEAV

SEQ ID NO: 38974 - protein, 7 aa, synthetic construct
YWTGTHE

SEQ ID NO: 38975 - protein, 7 aa, synthetic construct
CKEGTRG

SEQ ID NO: 38976 - protein, 7 aa, synthetic construct
GCGTKVG

SEQ ID NO: 38977 - protein, 7 aa, synthetic construct
GSDFSRW

SEQ ID NO: 38978 - protein, 7 aa, synthetic construct
CKPLMSP

SEQ ID NO: 38979 - protein, 7 aa, synthetic construct
YSRIQPM

SEQ ID NO: 38980 - protein, 7 aa, synthetic construct
YHRLGQN

SEQ ID NO: 38981 - protein, 7 aa, synthetic construct
YSRIQAN

SEQ ID NO: 38982 - protein, 7 aa, synthetic construct
NGINGRW

SEQ ID NO: 38983 - protein, 7 aa, synthetic construct
FFTGRLE

SEQ ID NO: 38984 - protein, 7 aa, synthetic construct
RYEPKCP

SEQ ID NO: 38985 - protein, 7 aa, synthetic construct
YYSGVIA

SEQ ID NO: 38986 - protein, 7 aa, synthetic construct
YFTGMAN

SEQ ID NO: 38987 - protein, 7 aa, synthetic construct
KSEFRSF

SEQ ID NO: 38988 - protein, 7 aa, synthetic construct
CRPGEPY

SEQ ID NO: 38989 - protein, 7 aa, synthetic construct
YLKSPCA

SEQ ID NO: 38990 - protein, 7 aa, synthetic construct
GPETVRW

SEQ ID NO: 38991 - protein, 7 aa, synthetic construct
YWAGIVD

SEQ ID NO: 38992 - protein, 7 aa, synthetic construct
LCKGSLD

SEQ ID NO: 38993 - protein, 7 aa, synthetic construct
RSDFTTY

SEQ ID NO: 38994 - protein, 7 aa, synthetic construct
YFSRIQE

SEQ ID NO: 38995 - protein, 7 aa, synthetic construct
GCRHPDI

SEQ ID NO: 38996 - protein, 7 aa, synthetic construct
CRPDVKT

SEQ ID NO: 38997 - protein, 7 aa, synthetic construct
GCRTGDI

SEQ ID NO: 38998 - protein, 7 aa, synthetic construct
YVKSQLV

SEQ ID NO: 38999 - protein, 7 aa, synthetic construct
WFTGRVD

SEQ ID NO: 39000 - protein, 7 aa, synthetic construct
YVKSDRV

SEQ ID NO: 39001 - protein, 7 aa, synthetic construct
YSRILPN

SEQ ID NO: 39002 - protein, 7 aa, synthetic construct
KEEYCKP

SEQ ID NO: 39003 - protein, 7 aa, synthetic construct
FFSGKID

SEQ ID NO: 39004 - protein, 7 aa, synthetic construct
YSKIGFD

SEQ ID NO: 39005 - protein, 7 aa, synthetic construct
YYTGKQD

SEQ ID NO: 39006 - protein, 7 aa, synthetic construct
MWDGTDA

SEQ ID NO: 39007 - protein, 7 aa, synthetic construct
KDDWTPY

SEQ ID NO: 39008 - protein, 7 aa, synthetic construct
YFHGVTE

SEQ ID NO: 39009 - protein, 7 aa, synthetic construct
IPYEGIG

SEQ ID NO: 39010 - protein, 7 aa, synthetic construct
YFSGKND

SEQ ID NO: 39011 - protein, 7 aa, synthetic construct
YYTGIQA

SEQ ID NO: 39012 - protein, 7 aa, synthetic construct
YHKLQYG

SEQ ID NO: 39013 - protein, 7 aa, synthetic construct
YWQGIKE

SEQ ID NO: 39014 - protein, 7 aa, synthetic construct
YWEGVRA

SEQ ID NO: 39015 - protein, 7 aa, synthetic construct
CKPVCCD

SEQ ID NO: 39016 - protein, 7 aa, synthetic construct
YFHGKMD

SEQ ID NO: 39017 - protein, 7 aa, synthetic construct
YFSGVMP

SEQ ID NO: 39018 - protein, 7 aa, synthetic construct
RTGTSCL

SEQ ID NO: 39019 - protein, 7 aa, synthetic construct
YHRLSDF

SEQ ID NO: 39020 - protein, 7 aa, synthetic construct
YFAGRYD

SEQ ID NO: 39021 - protein, 7 aa, synthetic construct
PYARSLD

SEQ ID NO: 39022 - protein, 7 aa, synthetic construct
YSRLQMN

SEQ ID NO: 39023 - protein, 7 aa, synthetic construct
YWTGMTD

SEQ ID NO: 39024 - protein, 7 aa, synthetic construct
MFDGTVA

SEQ ID NO: 39025 - protein, 7 aa, synthetic construct
CKLSSPS

SEQ ID NO: 39026 - protein, 7 aa, synthetic construct
CKANTKD

SEQ ID NO: 39027 - protein, 7 aa, synthetic construct
YWSGKLE

SEQ ID NO: 39028 - protein, 7 aa, synthetic construct
DLRLADW

SEQ ID NO: 39029 - protein, 7 aa, synthetic construct
YYSGIVK

SEQ ID NO: 39030 - protein, 7 aa, synthetic construct
VESDHGR

SEQ ID NO: 39031 - protein, 7 aa, synthetic construct
KCRPCSE

SEQ ID NO: 39032 - protein, 7 aa, synthetic construct
CKPPPKI

SEQ ID NO: 39033 - protein, 7 aa, synthetic construct
YFSGIQG

SEQ ID NO: 39034 - protein, 7 aa, synthetic construct
YRPGCIG

SEQ ID NO: 39035 - protein, 7 aa, synthetic construct
YTRLSDN

SEQ ID NO: 39036 - protein, 7 aa, synthetic construct
TSEFKVY

SEQ ID NO: 39037 - protein, 7 aa, synthetic construct
YFSGRPE

SEQ ID NO: 39038 - protein, 7 aa, synthetic construct
FFSGRIE

SEQ ID NO: 39039 - protein, 7 aa, synthetic construct
YWSGLVE

SEQ ID NO: 39040 - protein, 7 aa, synthetic construct
YFTRVLE

SEQ ID NO: 39041 - protein, 7 aa, synthetic construct
KDDWTSY

SEQ ID NO: 39042 - protein, 7 aa, synthetic construct
GGEFKCF

SEQ ID NO: 39043 - protein, 7 aa, synthetic construct
RDDWTVF

SEQ ID NO: 39044 - protein, 7 aa, synthetic construct
YFTGQTM

SEQ ID NO: 39045 - protein, 7 aa, synthetic construct
FFTGYID

SEQ ID NO: 39046 - protein, 7 aa, synthetic construct
YSRLSID

SEQ ID NO: 39047 - protein, 7 aa, synthetic construct
YFTGVQG

SEQ ID NO: 39048 - protein, 7 aa, synthetic construct
KLGGSCG

SEQ ID NO: 39049 - protein, 7 aa, synthetic construct
DDGFSKW

SEQ ID NO: 39050 - protein, 7 aa, synthetic construct
FFSGKVE

SEQ ID NO: 39051 - protein, 7 aa, synthetic construct
YFAGTHD

SEQ ID NO: 39052 - protein, 7 aa, synthetic construct
WTPMCKQ

SEQ ID NO: 39053 - protein, 7 aa, synthetic construct
CAPYHHE

SEQ ID NO: 39054 - protein, 7 aa, synthetic construct
YHAAGPD

SEQ ID NO: 39055 - protein, 7 aa, synthetic construct
WWSGVQE

SEQ ID NO: 39056 - protein, 7 aa, synthetic construct
WPNGVAG

SEQ ID NO: 39057 - protein, 7 aa, synthetic construct
CKPPTAP

SEQ ID NO: 39058 - protein, 7 aa, synthetic construct
KLDYLGI

SEQ ID NO: 39059 - protein, 7 aa, synthetic construct
YFSGTHN

SEQ ID NO: 39060 - protein, 7 aa, synthetic construct
DMGSANW

SEQ ID NO: 39061 - protein, 7 aa, synthetic construct
RDGTSIW

SEQ ID NO: 39062 - protein, 7 aa, synthetic construct
QSPGCKD

SEQ ID NO: 39063 - protein, 7 aa, synthetic construct
KDDWSSW

SEQ ID NO: 39064 - protein, 7 aa, synthetic construct
YYSGIHA

SEQ ID NO: 39065 - protein, 7 aa, synthetic construct
RNEFCQP

SEQ ID NO: 39066 - protein, 7 aa, synthetic construct
WFSGKIE

SEQ ID NO: 39067 - protein, 7 aa, synthetic construct
YSRVSDN

SEQ ID NO: 39068 - protein, 7 aa, synthetic construct
YYTGKCD

SEQ ID NO: 39069 - protein, 7 aa, synthetic construct
FWSGVKD

SEQ ID NO: 39070 - protein, 7 aa, synthetic construct
YVRSQML

SEQ ID NO: 39071 - protein, 7 aa, synthetic construct
CGRAGRD

SEQ ID NO: 39072 - protein, 7 aa, synthetic construct
VMEARGW

SEQ ID NO: 39073 - protein, 7 aa, synthetic construct
LHRLHTD

SEQ ID NO: 39074 - protein, 7 aa, synthetic construct
DLRDRIW

SEQ ID NO: 39075 - protein, 7 aa, synthetic construct
YFSGVQV

SEQ ID NO: 39076 - protein, 7 aa, synthetic construct
YSRRSDN

SEQ ID NO: 39077 - protein, 7 aa, synthetic construct
IMEDRVW

SEQ ID NO: 39078 - protein, 7 aa, synthetic construct
YTKLDYN

SEQ ID NO: 39079 - protein, 7 aa, synthetic construct
CMSGPRP

SEQ ID NO: 39080 - protein, 7 aa, synthetic construct
GDGQSRW

SEQ ID NO: 39081 - protein, 7 aa, synthetic construct
RDDFTGY

SEQ ID NO: 39082 - protein, 7 aa, synthetic construct
YFAGVKD

SEQ ID NO: 39083 - protein, 7 aa, synthetic construct
GSMTSTW

SEQ ID NO: 39084 - protein, 7 aa, synthetic construct
YYTGHVN

SEQ ID NO: 39085 - protein, 7 aa, synthetic construct
YYSGVKS

SEQ ID NO: 39086 - protein, 7 aa, synthetic construct
YWHGVVD

SEQ ID NO: 39087 - protein, 7 aa, synthetic construct
YFTGVHP

SEQ ID NO: 39088 - protein, 7 aa, synthetic construct
QNEFTMY

SEQ ID NO: 39089 - protein, 7 aa, synthetic construct
YFSGIPM

SEQ ID NO: 39090 - protein, 7 aa, synthetic construct
QHPICKP

SEQ ID NO: 39091 - protein, 7 aa, synthetic construct
CTPKTGH

SEQ ID NO: 39092 - protein, 7 aa, synthetic construct
RDEFMHY

SEQ ID NO: 39093 - protein, 7 aa, synthetic construct
YYTGVKM

SEQ ID NO: 39094 - protein, 7 aa, synthetic construct
RSEFTGY

SEQ ID NO: 39095 - protein, 7 aa, synthetic construct
VSTHCIA

SEQ ID NO: 39096 - protein, 7 aa, synthetic construct
YWHGVPE

SEQ ID NO: 39097 - protein, 7 aa, synthetic construct
CMSTSRS

SEQ ID NO: 39098 - protein, 7 aa, synthetic construct
YVKSQMI

SEQ ID NO: 39099 - protein, 7 aa, synthetic construct
QRPCQPG

SEQ ID NO: 39100 - protein, 7 aa, synthetic construct
YEPGCGE

SEQ ID NO: 39101 - protein, 7 aa, synthetic construct
CKPDSFR

SEQ ID NO: 39102 - protein, 7 aa, synthetic construct
YFSGTRA

SEQ ID NO: 39103 - protein, 7 aa, synthetic construct
KDEFTIY

SEQ ID NO: 39104 - protein, 7 aa, synthetic construct
CNIPMTA

SEQ ID NO: 39105 - protein, 7 aa, synthetic construct
YWDGTPA

SEQ ID NO: 39106 - protein, 7 aa, synthetic construct
CKGESAI

SEQ ID NO: 39107 - protein, 7 aa, synthetic construct
YFHGRVD

SEQ ID NO: 39108 - protein, 7 aa, synthetic construct
YWSGKVA

SEQ ID NO: 39109 - protein, 7 aa, synthetic construct
YWTGTID

SEQ ID NO: 39110 - protein, 7 aa, synthetic construct
CKPDCCP

SEQ ID NO: 39111 - protein, 7 aa, synthetic construct
YFAGKQD

SEQ ID NO: 39112 - protein, 7 aa, synthetic construct
YYSGIIS

SEQ ID NO: 39113 - protein, 7 aa, synthetic construct
RGEFCGG

SEQ ID NO: 39114 - protein, 7 aa, synthetic construct
YVRNDPN

SEQ ID NO: 39115 - protein, 7 aa, synthetic construct
VGEARSW

SEQ ID NO: 39116 - protein, 7 aa, synthetic construct
VSEFRTY

SEQ ID NO: 39117 - protein, 7 aa, synthetic construct
WEPMCKA

SEQ ID NO: 39118 - protein, 7 aa, synthetic construct
CKPPSPI

SEQ ID NO: 39119 - protein, 7 aa, synthetic construct
ACKPQMG

SEQ ID NO: 39120 - protein, 7 aa, synthetic construct
GNGTKCG

SEQ ID NO: 39121 - protein, 7 aa, synthetic construct
GGDGSSW

SEQ ID NO: 39122 - protein, 7 aa, synthetic construct
CLGKCKP

SEQ ID NO: 39123 - protein, 7 aa, synthetic construct
LCRACSE

SEQ ID NO: 39124 - protein, 7 aa, synthetic construct
GIANTMW

SEQ ID NO: 39125 - protein, 7 aa, synthetic construct
FFTGQRD

SEQ ID NO: 39126 - protein, 7 aa, synthetic construct
YFSGRTD

SEQ ID NO: 39127 - protein, 7 aa, synthetic construct
YHKSQQY

SEQ ID NO: 39128 - protein, 7 aa, synthetic construct
IPGHKCA

SEQ ID NO: 39129 - protein, 7 aa, synthetic construct
WSRIGPN

SEQ ID NO: 39130 - protein, 7 aa, synthetic construct
WDGSCKA

SEQ ID NO: 39131 - protein, 7 aa, synthetic construct
CKPFTRE

SEQ ID NO: 39132 - protein, 7 aa, synthetic construct
DYAYSRE

SEQ ID NO: 39133 - protein, 7 aa, synthetic construct
IMGDRTW

SEQ ID NO: 39134 - protein, 7 aa, synthetic construct
SLADRKW

SEQ ID NO: 39135 - protein, 7 aa, synthetic construct
FCSTNGV

SEQ ID NO: 39136 - protein, 7 aa, synthetic construct
FHRLSTN

SEQ ID NO: 39137 - protein, 7 aa, synthetic construct
IMQDRAW

SEQ ID NO: 39138 - protein, 7 aa, synthetic construct
DMASRMW

SEQ ID NO: 39139 - protein, 7 aa, synthetic construct
RTEFEGY

SEQ ID NO: 39140 - protein, 7 aa, synthetic construct
FFSGVKD

SEQ ID NO: 39141 - protein, 7 aa, synthetic construct
YWSGLLD

SEQ ID NO: 39142 - protein, 7 aa, synthetic construct
RDYDAFP

SEQ ID NO: 39143 - protein, 7 aa, synthetic construct
LSKVGPD

SEQ ID NO: 39144 - protein, 7 aa, synthetic construct
YFSGMRS

SEQ ID NO: 39145 - protein, 7 aa, synthetic construct
RGESHGW

SEQ ID NO: 39146 - protein, 7 aa, synthetic construct
WYSGIKE

SEQ ID NO: 39147 - protein, 7 aa, synthetic construct
TDDWSSY

SEQ ID NO: 39148 - protein, 7 aa, synthetic construct
CMPCTPC

SEQ ID NO: 39149 - protein, 7 aa, synthetic construct
CGPGCCE

SEQ ID NO: 39150 - protein, 7 aa, synthetic construct
ADGVSKW

SEQ ID NO: 39151 - protein, 7 aa, synthetic construct
KDGYSVW

SEQ ID NO: 39152 - protein, 7 aa, synthetic construct
RTYDAFA

SEQ ID NO: 39153 - protein, 7 aa, synthetic construct
YFSGVSM

SEQ ID NO: 39154 - protein, 7 aa, synthetic construct
GCRPQAG

SEQ ID NO: 39155 - protein, 7 aa, synthetic construct
FWSGIVE

SEQ ID NO: 39156 - protein, 7 aa, synthetic construct
PYARSVD

SEQ ID NO: 39157 - protein, 7 aa, synthetic construct
YFSGVHQ

SEQ ID NO: 39158 - protein, 7 aa, synthetic construct
YHRLSEM

SEQ ID NO: 39159 - protein, 7 aa, synthetic construct
YWSGLKE

SEQ ID NO: 39160 - protein, 7 aa, synthetic construct
RTFDSYA

SEQ ID NO: 39161 - protein, 7 aa, synthetic construct
CKPRMLE

SEQ ID NO: 39162 - protein, 7 aa, synthetic construct
YFTGYTE

SEQ ID NO: 39163 - protein, 7 aa, synthetic construct
LWDGTMS

SEQ ID NO: 39164 - protein, 7 aa, synthetic construct
CKPPSDM

SEQ ID NO: 39165 - protein, 7 aa, synthetic construct
LCNPCLT

SEQ ID NO: 39166 - protein, 7 aa, synthetic construct
WYSGIRE

SEQ ID NO: 39167 - protein, 7 aa, synthetic construct
LYDGDGP

SEQ ID NO: 39168 - protein, 7 aa, synthetic construct
LLQSTTW

SEQ ID NO: 39169 - protein, 7 aa, synthetic construct
YCKDNRP

SEQ ID NO: 39170 - protein, 7 aa, synthetic construct
LNDYVTY

SEQ ID NO: 39171 - protein, 7 aa, synthetic construct
YARTGWD

SEQ ID NO: 39172 - protein, 7 aa, synthetic construct
QDEYLSW

SEQ ID NO: 39173 - protein, 7 aa, synthetic construct
DMRDRMW

SEQ ID NO: 39174 - protein, 7 aa, synthetic construct
GSGTSSW

SEQ ID NO: 39175 - protein, 7 aa, synthetic construct
IMESQSW

SEQ ID NO: 39176 - protein, 7 aa, synthetic construct
YWAGKIE

SEQ ID NO: 39177 - protein, 7 aa, synthetic construct
YWSGTVD

SEQ ID NO: 39178 - protein, 7 aa, synthetic construct
YWSKIAE

SEQ ID NO: 39179 - protein, 7 aa, synthetic construct
RDSTHGI

SEQ ID NO: 39180 - protein, 7 aa, synthetic construct
YYTGQVS

SEQ ID NO: 39181 - protein, 7 aa, synthetic construct
FHRLSDD

SEQ ID NO: 39182 - protein, 7 aa, synthetic construct
YMKDAFP

SEQ ID NO: 39183 - protein, 7 aa, synthetic construct
KDDWNSW

SEQ ID NO: 39184 - protein, 7 aa, synthetic construct
WFTGKVD

SEQ ID NO: 39185 - protein, 7 aa, synthetic construct
YSRIGPM

SEQ ID NO: 39186 - protein, 7 aa, synthetic construct
GDEWVGY

SEQ ID NO: 39187 - protein, 7 aa, synthetic construct
CKPPMAP

SEQ ID NO: 39188 - protein, 7 aa, synthetic construct
RDADVFP

SEQ ID NO: 39189 - protein, 7 aa, synthetic construct
WVKSQQH

SEQ ID NO: 39190 - protein, 7 aa, synthetic construct
YWTGVGA

SEQ ID NO: 39191 - protein, 7 aa, synthetic construct
YHARQIN

SEQ ID NO: 39192 - protein, 7 aa, synthetic construct
YWSGKAA

SEQ ID NO: 39193 - protein, 7 aa, synthetic construct
RQSTNGV

SEQ ID NO: 39194 - protein, 7 aa, synthetic construct
YWSAVVA

SEQ ID NO: 39195 - protein, 7 aa, synthetic construct
AMQDRSW

SEQ ID NO: 39196 - protein, 7 aa, synthetic construct
CAPYLRE

SEQ ID NO: 39197 - protein, 7 aa, synthetic construct
RSDFTSY

SEQ ID NO: 39198 - protein, 7 aa, synthetic construct
FFTGIQA

SEQ ID NO: 39199 - protein, 7 aa, synthetic construct
RDDYVYY

SEQ ID NO: 39200 - protein, 7 aa, synthetic construct
CHKKEEG

SEQ ID NO: 39201 - protein, 7 aa, synthetic construct
SMASVKW

SEQ ID NO: 39202 - protein, 7 aa, synthetic construct
YPGKTCS

SEQ ID NO: 39203 - protein, 7 aa, synthetic construct
SLESRDW

SEQ ID NO: 39204 - protein, 7 aa, synthetic construct
VPSSVKW

SEQ ID NO: 39205 - protein, 7 aa, synthetic construct
YFSGQHS

SEQ ID NO: 39206 - protein, 7 aa, synthetic construct
CSVVTGS

SEQ ID NO: 39207 - protein, 7 aa, synthetic construct
TWMGDNA

SEQ ID NO: 39208 - protein, 7 aa, synthetic construct
YWQGIVD

SEQ ID NO: 39209 - protein, 7 aa, synthetic construct
YFTGRPM

SEQ ID NO: 39210 - protein, 7 aa, synthetic construct
RDGTSQW

SEQ ID NO: 39211 - protein, 7 aa, synthetic construct
LHRLHLD

SEQ ID NO: 39212 - protein, 7 aa, synthetic construct
YYSGRIE

SEQ ID NO: 39213 - protein, 7 aa, synthetic construct
GCRHGPI

SEQ ID NO: 39214 - protein, 7 aa, synthetic construct
IAERGCA

SEQ ID NO: 39215 - protein, 7 aa, synthetic construct
CKPKQVD

SEQ ID NO: 39216 - protein, 7 aa, synthetic construct
YFQGRID

SEQ ID NO: 39217 - protein, 7 aa, synthetic construct
MGGTSCL

SEQ ID NO: 39218 - protein, 7 aa, synthetic construct
YWSGLHA

SEQ ID NO: 39219 - protein, 7 aa, synthetic construct
KCDIKPA

SEQ ID NO: 39220 - protein, 7 aa, synthetic construct
VMDGLRW

SEQ ID NO: 39221 - protein, 7 aa, synthetic construct
YFTKQVD

SEQ ID NO: 39222 - protein, 7 aa, synthetic construct
YFSGVTG

SEQ ID NO: 39223 - protein, 7 aa, synthetic construct
SSGTSRW

SEQ ID NO: 39224 - protein, 7 aa, synthetic construct
CKSQSSQ

SEQ ID NO: 39225 - protein, 7 aa, synthetic construct
RSEFTSY

SEQ ID NO: 39226 - protein, 7 aa, synthetic construct
YYSGRVE

SEQ ID NO: 39227 - protein, 7 aa, synthetic construct
CRDDKRW

SEQ ID NO: 39228 - protein, 7 aa, synthetic construct
CKGQGPS

SEQ ID NO: 39229 - protein, 7 aa, synthetic construct
IMSDREW

SEQ ID NO: 39230 - protein, 7 aa, synthetic construct
YFSGTHS

SEQ ID NO: 39231 - protein, 7 aa, synthetic construct
CRMDSVP

SEQ ID NO: 39232 - protein, 7 aa, synthetic construct
YVRSDTF

SEQ ID NO: 39233 - protein, 7 aa, synthetic construct
YHRLGDS

SEQ ID NO: 39234 - protein, 7 aa, synthetic construct
CKPSPGM

SEQ ID NO: 39235 - protein, 7 aa, synthetic construct
YSRIGEG

SEQ ID NO: 39236 - protein, 7 aa, synthetic construct
CKPQTIG

SEQ ID NO: 39237 - protein, 7 aa, synthetic construct
YFSGTNA

SEQ ID NO: 39238 - protein, 7 aa, synthetic construct
CCKDECP

SEQ ID NO: 39239 - protein, 7 aa, synthetic construct
RDGESYW

SEQ ID NO: 39240 - protein, 7 aa, synthetic construct
YSRAGDG

SEQ ID NO: 39241 - protein, 7 aa, synthetic construct
RPECVTG

SEQ ID NO: 39242 - protein, 7 aa, synthetic construct
NDGRSLW

SEQ ID NO: 39243 - protein, 7 aa, synthetic construct
YTKSGPS

SEQ ID NO: 39244 - protein, 7 aa, synthetic construct
CKKACGA

SEQ ID NO: 39245 - protein, 7 aa, synthetic construct
CKPYLHE

SEQ ID NO: 39246 - protein, 7 aa, synthetic construct
VAGAGCG

SEQ ID NO: 39247 - protein, 7 aa, synthetic construct
VPERCPK

SEQ ID NO: 39248 - protein, 7 aa, synthetic construct
YWSGLKD

SEQ ID NO: 39249 - protein, 7 aa, synthetic construct
RDITVFP

SEQ ID NO: 39250 - protein, 7 aa, synthetic construct
YFSGQIV

SEQ ID NO: 39251 - protein, 7 aa, synthetic construct
GGIGSAW

SEQ ID NO: 39252 - protein, 7 aa, synthetic construct
YWTGMPD

SEQ ID NO: 39253 - protein, 7 aa, synthetic construct
CKSNTYD

SEQ ID NO: 39254 - protein, 7 aa, synthetic construct
FHRLLLD

SEQ ID NO: 39255 - protein, 7 aa, synthetic construct
YWTGKHE

SEQ ID NO: 39256 - protein, 7 aa, synthetic construct
LPGVKCP

SEQ ID NO: 39257 - protein, 7 aa, synthetic construct
YFTGAYD

SEQ ID NO: 39258 - protein, 7 aa, synthetic construct
YSKCNVN

SEQ ID NO: 39259 - protein, 7 aa, synthetic construct
AMPDRGW

SEQ ID NO: 39260 - protein, 7 aa, synthetic construct
YAKTSLN

SEQ ID NO: 39261 - protein, 7 aa, synthetic construct
KDGVSKW

SEQ ID NO: 39262 - protein, 7 aa, synthetic construct
KDDFTRY

SEQ ID NO: 39263 - protein, 7 aa, synthetic construct
RTYDTFP

SEQ ID NO: 39264 - protein, 7 aa, synthetic construct
YFSKVQA

SEQ ID NO: 39265 - protein, 7 aa, synthetic construct
YSRLSDN

SEQ ID NO: 39266 - protein, 7 aa, synthetic construct
REEGVGW

SEQ ID NO: 39267 - protein, 7 aa, synthetic construct
RDDYSSY

SEQ ID NO: 39268 - protein, 7 aa, synthetic construct
YFTGMQD

SEQ ID NO: 39269 - protein, 7 aa, synthetic construct
CRPRTIE

SEQ ID NO: 39270 - protein, 7 aa, synthetic construct
IPHKGIG

SEQ ID NO: 39271 - protein, 7 aa, synthetic construct
KDDWTTY

SEQ ID NO: 39272 - protein, 7 aa, synthetic construct
DPSSRAW

SEQ ID NO: 39273 - protein, 7 aa, synthetic construct
YVRHDPM

SEQ ID NO: 39274 - protein, 7 aa, synthetic construct
YFQGVKS

SEQ ID NO: 39275 - protein, 7 aa, synthetic construct
WVRSDIK

SEQ ID NO: 39276 - protein, 7 aa, synthetic construct
YFSGVSH

SEQ ID NO: 39277 - protein, 7 aa, synthetic construct
CRIESRA

SEQ ID NO: 39278 - protein, 7 aa, synthetic construct
YYTGRVS

SEQ ID NO: 39279 - protein, 7 aa, synthetic construct
CQAKLEV

SEQ ID NO: 39280 - protein, 7 aa, synthetic construct
REDFTMW

SEQ ID NO: 39281 - protein, 7 aa, synthetic construct
CMKRPEV

SEQ ID NO: 39282 - protein, 7 aa, synthetic construct
YFSGEHD

SEQ ID NO: 39283 - protein, 7 aa, synthetic construct
YWTGLKD

SEQ ID NO: 39284 - protein, 7 aa, synthetic construct
RVGGDCP

SEQ ID NO: 39285 - protein, 7 aa, synthetic construct
QDGYSSW

SEQ ID NO: 39286 - protein, 7 aa, synthetic construct
EPESRDW

SEQ ID NO: 39287 - protein, 7 aa, synthetic construct
MTGTSCG

SEQ ID NO: 39288 - protein, 7 aa, synthetic construct
YHRLGDT

SEQ ID NO: 39289 - protein, 7 aa, synthetic construct
YWTGMQA

SEQ ID NO: 39290 - protein, 7 aa, synthetic construct
GSENVRW

SEQ ID NO: 39291 - protein, 7 aa, synthetic construct
YFTGQHN

SEQ ID NO: 39292 - protein, 7 aa, synthetic construct
CDGSFKA

SEQ ID NO: 39293 - protein, 7 aa, synthetic construct
CKPLPSG

SEQ ID NO: 39294 - protein, 7 aa, synthetic construct
YTRVSDN

SEQ ID NO: 39295 - protein, 7 aa, synthetic construct
REEYTAY

SEQ ID NO: 39296 - protein, 7 aa, synthetic construct
FFSGIRD

SEQ ID NO: 39297 - protein, 7 aa, synthetic construct
SPETRCP

SEQ ID NO: 39298 - protein, 7 aa, synthetic construct
KDDFTGY

SEQ ID NO: 39299 - protein, 7 aa, synthetic construct
GCGTKFG

SEQ ID NO: 39300 - protein, 7 aa, synthetic construct
RDGTSTW

SEQ ID NO: 39301 - protein, 7 aa, synthetic construct
CAVYLHE

SEQ ID NO: 39302 - protein, 7 aa, synthetic construct
RDYEVYP

SEQ ID NO: 39303 - protein, 7 aa, synthetic construct
RNFDAYP

SEQ ID NO: 39304 - protein, 7 aa, synthetic construct
IMGDRKW

SEQ ID NO: 39305 - protein, 7 aa, synthetic construct
RSSDAYP

SEQ ID NO: 39306 - protein, 7 aa, synthetic construct
YWTGKPD

SEQ ID NO: 39307 - protein, 7 aa, synthetic construct
YSKLHTH

SEQ ID NO: 39308 - protein, 7 aa, synthetic construct
FSRLSPV

SEQ ID NO: 39309 - protein, 7 aa, synthetic construct
YFSGRPD

SEQ ID NO: 39310 - protein, 7 aa, synthetic construct
YFTGRTQ

SEQ ID NO: 39311 - protein, 7 aa, synthetic construct
CKPRTSE

SEQ ID NO: 39312 - protein, 7 aa, synthetic construct
SDGFSKW

SEQ ID NO: 39313 - protein, 7 aa, synthetic construct
LHRLGEH

SEQ ID NO: 39314 - protein, 7 aa, synthetic construct
PYARSPE

SEQ ID NO: 39315 - protein, 7 aa, synthetic construct
CKPQGGT

SEQ ID NO: 39316 - protein, 7 aa, synthetic construct
VSTHTCA

SEQ ID NO: 39317 - protein, 7 aa, synthetic construct
GEEHVRW

SEQ ID NO: 39318 - protein, 7 aa, synthetic construct
TMRDAYP

SEQ ID NO: 39319 - protein, 7 aa, synthetic construct
CGGGKPP

SEQ ID NO: 39320 - protein, 7 aa, synthetic construct
RGDFHMY

SEQ ID NO: 39321 - protein, 7 aa, synthetic construct
VCRPCAG

SEQ ID NO: 39322 - protein, 7 aa, synthetic construct
KDEFTVY

SEQ ID NO: 39323 - protein, 7 aa, synthetic construct
YSRIAPN

SEQ ID NO: 39324 - protein, 7 aa, synthetic construct
LPRTGNW

SEQ ID NO: 39325 - protein, 7 aa, synthetic construct
REEFVSY

SEQ ID NO: 39326 - protein, 7 aa, synthetic construct
REGTSYW

SEQ ID NO: 39327 - protein, 7 aa, synthetic construct
CREGTRL

SEQ ID NO: 39328 - protein, 7 aa, synthetic construct
YWSQVKE

SEQ ID NO: 39329 - protein, 7 aa, synthetic construct
YSRVQDD

SEQ ID NO: 39330 - protein, 7 aa, synthetic construct
VSTHECA

SEQ ID NO: 39331 - protein, 7 aa, synthetic construct
YHKSQSY

SEQ ID NO: 39332 - protein, 7 aa, synthetic construct
YFHGLIA

SEQ ID NO: 39333 - protein, 7 aa, synthetic construct
YFTKQID

SEQ ID NO: 39334 - protein, 7 aa, synthetic construct
YAKGEPC

SEQ ID NO: 39335 - protein, 7 aa, synthetic construct
GEEGVRW

SEQ ID NO: 39336 - protein, 7 aa, synthetic construct
RGDYTPW

SEQ ID NO: 39337 - protein, 7 aa, synthetic construct
LSRASRD

SEQ ID NO: 39338 - protein, 7 aa, synthetic construct
YSRIGPQ

SEQ ID NO: 39339 - protein, 7 aa, synthetic construct
YYTGRLD

SEQ ID NO: 39340 - protein, 7 aa, synthetic construct
YYSGVKQ

SEQ ID NO: 39341 - protein, 7 aa, synthetic construct
LQKPCLT

SEQ ID NO: 39342 - protein, 7 aa, synthetic construct
WAKSGPN

SEQ ID NO: 39343 - protein, 7 aa, synthetic construct
YFSGQTS

SEQ ID NO: 39344 - protein, 7 aa, synthetic construct
YWAGVRD

SEQ ID NO: 39345 - protein, 7 aa, synthetic construct
YWSGMHE

SEQ ID NO: 39346 - protein, 7 aa, synthetic construct
RDDFSIY

SEQ ID NO: 39347 - protein, 7 aa, synthetic construct
YHRLHPL

SEQ ID NO: 39348 - protein, 7 aa, synthetic construct
CNKPGTA

SEQ ID NO: 39349 - protein, 7 aa, synthetic construct
YFSGRQD

SEQ ID NO: 39350 - protein, 7 aa, synthetic construct
IARTGWD

SEQ ID NO: 39351 - protein, 7 aa, synthetic construct
GCMTKCG

SEQ ID NO: 39352 - protein, 7 aa, synthetic construct
YFTGMTA

SEQ ID NO: 39353 - protein, 7 aa, synthetic construct
YSRIQPN

SEQ ID NO: 39354 - protein, 7 aa, synthetic construct
YWSKVPD

SEQ ID NO: 39355 - protein, 7 aa, synthetic construct
CRPMCKP

SEQ ID NO: 39356 - protein, 7 aa, synthetic construct
GCRPGDI

SEQ ID NO: 39357 - protein, 7 aa, synthetic construct
YFSGRTS

SEQ ID NO: 39358 - protein, 7 aa, synthetic construct
KDDYTRF

SEQ ID NO: 39359 - protein, 7 aa, synthetic construct
VDDWSPF

SEQ ID NO: 39360 - protein, 7 aa, synthetic construct
APNTVKW

SEQ ID NO: 39361 - protein, 7 aa, synthetic construct
YFHGMVE

SEQ ID NO: 39362 - protein, 7 aa, synthetic construct
LFSGPKC

SEQ ID NO: 39363 - protein, 7 aa, synthetic construct
MTGKSCL

SEQ ID NO: 39364 - protein, 7 aa, synthetic construct
ISGRGWD

SEQ ID NO: 39365 - protein, 7 aa, synthetic construct
YPYGTNA

SEQ ID NO: 39366 - protein, 7 aa, synthetic construct
CGQKCRP

SEQ ID NO: 39367 - protein, 7 aa, synthetic construct
CRTRSPE

SEQ ID NO: 39368 - protein, 7 aa, synthetic construct
YWTGQLA

SEQ ID NO: 39369 - protein, 7 aa, synthetic construct
RDEFTKF

SEQ ID NO: 39370 - protein, 7 aa, synthetic construct
YFTGMTE

SEQ ID NO: 39371 - protein, 7 aa, synthetic construct
NGNACRP

SEQ ID NO: 39372 - protein, 7 aa, synthetic construct
CTYKTGH

SEQ ID NO: 39373 - protein, 7 aa, synthetic construct
CTSKTDH

SEQ ID NO: 39374 - protein, 7 aa, synthetic construct
YSRAQLD

SEQ ID NO: 39375 - protein, 7 aa, synthetic construct
RTYDSYA

SEQ ID NO: 39376 - protein, 7 aa, synthetic construct
CKALSQD

SEQ ID NO: 39377 - protein, 7 aa, synthetic construct
YGKVGMC

SEQ ID NO: 39378 - protein, 7 aa, synthetic construct
YWHGVKD

SEQ ID NO: 39379 - protein, 7 aa, synthetic construct
YHARSPL

SEQ ID NO: 39380 - protein, 7 aa, synthetic construct
YSRLQAI

SEQ ID NO: 39381 - protein, 7 aa, synthetic construct
YFSGLHA

SEQ ID NO: 39382 - protein, 7 aa, synthetic construct
CKGLPPP

SEQ ID NO: 39383 - protein, 7 aa, synthetic construct
CDGSVKA

SEQ ID NO: 39384 - protein, 7 aa, synthetic construct
GAGGVCP

SEQ ID NO: 39385 - protein, 7 aa, synthetic construct
YYTGKLE

SEQ ID NO: 39386 - protein, 7 aa, synthetic construct
CRSGDAA

SEQ ID NO: 39387 - protein, 7 aa, synthetic construct
TWDGLIP

SEQ ID NO: 39388 - protein, 7 aa, synthetic construct
FHRLSPG

SEQ ID NO: 39389 - protein, 7 aa, synthetic construct
RNDFVSW

SEQ ID NO: 39390 - protein, 7 aa, synthetic construct
MWDGTNA

SEQ ID NO: 39391 - protein, 7 aa, synthetic construct
CFKPMTA

SEQ ID NO: 39392 - protein, 7 aa, synthetic construct
WTNMCKA

SEQ ID NO: 39393 - protein, 7 aa, synthetic construct
CKGRDID

SEQ ID NO: 39394 - protein, 7 aa, synthetic construct
GSGESRW

SEQ ID NO: 39395 - protein, 7 aa, synthetic construct
YSRIGPT

SEQ ID NO: 39396 - protein, 7 aa, synthetic construct
FFSGQVE

SEQ ID NO: 39397 - protein, 7 aa, synthetic construct
YWTGTIE

SEQ ID NO: 39398 - protein, 7 aa, synthetic construct
YWSAVQE

SEQ ID NO: 39399 - protein, 7 aa, synthetic construct
YWEGVKE

SEQ ID NO: 39400 - protein, 7 aa, synthetic construct
YEEGCKE

SEQ ID NO: 39401 - protein, 7 aa, synthetic construct
RGGDVFP

SEQ ID NO: 39402 - protein, 7 aa, synthetic construct
YVKSQPQ

SEQ ID NO: 39403 - protein, 7 aa, synthetic construct
RLESVNW

SEQ ID NO: 39404 - protein, 7 aa, synthetic construct
YWTGKME

SEQ ID NO: 39405 - protein, 7 aa, synthetic construct
WWSGQKD

SEQ ID NO: 39406 - protein, 7 aa, synthetic construct
RDGSSTW

SEQ ID NO: 39407 - protein, 7 aa, synthetic construct
WPFGVDA

SEQ ID NO: 39408 - protein, 7 aa, synthetic construct
YFHGRSE

SEQ ID NO: 39409 - protein, 7 aa, synthetic construct
CGGDRKS

SEQ ID NO: 39410 - protein, 7 aa, synthetic construct
KDDFVAY

SEQ ID NO: 39411 - protein, 7 aa, synthetic construct
VPERSCV

SEQ ID NO: 39412 - protein, 7 aa, synthetic construct
CKEVKRD

SEQ ID NO: 39413 - protein, 7 aa, synthetic construct
YSRIQQN

SEQ ID NO: 39414 - protein, 7 aa, synthetic construct
IQLDCKG

SEQ ID NO: 39415 - protein, 7 aa, synthetic construct
YFTHKLD

SEQ ID NO: 39416 - protein, 7 aa, synthetic construct
YWAGKVD

SEQ ID NO: 39417 - protein, 7 aa, synthetic construct
REESLYW

SEQ ID NO: 39418 - protein, 7 aa, synthetic construct
YFTGVCP

SEQ ID NO: 39419 - protein, 7 aa, synthetic construct
GGEYVRW

SEQ ID NO: 39420 - protein, 7 aa, synthetic construct
MEPGCKE

SEQ ID NO: 39421 - protein, 7 aa, synthetic construct
YDSTNGR

SEQ ID NO: 39422 - protein, 7 aa, synthetic construct
CKPQAGG

SEQ ID NO: 39423 - protein, 7 aa, synthetic construct
YFAGIQA

SEQ ID NO: 39424 - protein, 7 aa, synthetic construct
WWSGTQA

SEQ ID NO: 39425 - protein, 7 aa, synthetic construct
YVRYDSG

SEQ ID NO: 39426 - protein, 7 aa, synthetic construct
GCPFKPQ

SEQ ID NO: 39427 - protein, 7 aa, synthetic construct
YFTGKED

SEQ ID NO: 39428 - protein, 7 aa, synthetic construct
RSEFMVY

SEQ ID NO: 39429 - protein, 7 aa, synthetic construct
ALYDRGW

SEQ ID NO: 39430 - protein, 7 aa, synthetic construct
FWTGVKD

SEQ ID NO: 39431 - protein, 7 aa, synthetic construct
RDGQSAY

SEQ ID NO: 39432 - protein, 7 aa, synthetic construct
YHRLQSV

SEQ ID NO: 39433 - protein, 7 aa, synthetic construct
YCKGPEL

SEQ ID NO: 39434 - protein, 7 aa, synthetic construct
YLKSQSK

SEQ ID NO: 39435 - protein, 7 aa, synthetic construct
CTLKTGH

SEQ ID NO: 39436 - protein, 7 aa, synthetic construct
LWTGENA

SEQ ID NO: 39437 - protein, 7 aa, synthetic construct
CKPQVVG

SEQ ID NO: 39438 - protein, 7 aa, synthetic construct
FFSGIHA

SEQ ID NO: 39439 - protein, 7 aa, synthetic construct
YFAGIIS

SEQ ID NO: 39440 - protein, 7 aa, synthetic construct
RAFDAYE

SEQ ID NO: 39441 - protein, 7 aa, synthetic construct
RGEYMYP

SEQ ID NO: 39442 - protein, 7 aa, synthetic construct
FWSGIHS

SEQ ID NO: 39443 - protein, 7 aa, synthetic construct
YSRLSTN

SEQ ID NO: 39444 - protein, 7 aa, synthetic construct
YFTKNCE

SEQ ID NO: 39445 - protein, 7 aa, synthetic construct
CTPYLHE

SEQ ID NO: 39446 - protein, 7 aa, synthetic construct
YHRLGDH

SEQ ID NO: 39447 - protein, 7 aa, synthetic construct
YLISQSY

SEQ ID NO: 39448 - protein, 7 aa, synthetic construct
YYSGIRD

SEQ ID NO: 39449 - protein, 7 aa, synthetic construct
RDSTHGV

SEQ ID NO: 39450 - protein, 7 aa, synthetic construct
IPIKCPS

SEQ ID NO: 39451 - protein, 7 aa, synthetic construct
CPRNTPP

SEQ ID NO: 39452 - protein, 7 aa, synthetic construct
YWSGIHS

SEQ ID NO: 39453 - protein, 7 aa, synthetic construct
FFTGYVD

SEQ ID NO: 39454 - protein, 7 aa, synthetic construct
HTGTSCL

SEQ ID NO: 39455 - protein, 7 aa, synthetic construct
YWSGTHE

SEQ ID NO: 39456 - protein, 7 aa, synthetic construct
GSEFLPW

SEQ ID NO: 39457 - protein, 7 aa, synthetic construct
YFSGVAM

SEQ ID NO: 39458 - protein, 7 aa, synthetic construct
FWSGVRE

SEQ ID NO: 39459 - protein, 7 aa, synthetic construct
REMSVYP

SEQ ID NO: 39460 - protein, 7 aa, synthetic construct
RDQYVYP

SEQ ID NO: 39461 - protein, 7 aa, synthetic construct
RLDSREW

SEQ ID NO: 39462 - protein, 7 aa, synthetic construct
REESVFP

SEQ ID NO: 39463 - protein, 7 aa, synthetic construct
CKPGSPG

SEQ ID NO: 39464 - protein, 7 aa, synthetic construct
CKRQSPE

SEQ ID NO: 39465 - protein, 7 aa, synthetic construct
YWSGKIE

SEQ ID NO: 39466 - protein, 7 aa, synthetic construct
TANCLKP

SEQ ID NO: 39467 - protein, 7 aa, synthetic construct
GCFSEGR

SEQ ID NO: 39468 - protein, 7 aa, synthetic construct
GCGTKLG

SEQ ID NO: 39469 - protein, 7 aa, synthetic construct
YWSGMQE

SEQ ID NO: 39470 - protein, 7 aa, synthetic construct
CKPGAAS

SEQ ID NO: 39471 - protein, 7 aa, synthetic construct
VARTGWD

SEQ ID NO: 39472 - protein, 7 aa, synthetic construct
RGDFSSW

SEQ ID NO: 39473 - protein, 7 aa, synthetic construct
GDGFSTW

SEQ ID NO: 39474 - protein, 7 aa, synthetic construct
YVRSDRA

SEQ ID NO: 39475 - protein, 7 aa, synthetic construct
YSKIGKD

SEQ ID NO: 39476 - protein, 7 aa, synthetic construct
CRDNKLE

SEQ ID NO: 39477 - protein, 7 aa, synthetic construct
FVKSQPC

SEQ ID NO: 39478 - protein, 7 aa, synthetic construct
GEPTCRP

SEQ ID NO: 39479 - protein, 7 aa, synthetic construct
RDEYVYF

SEQ ID NO: 39480 - protein, 7 aa, synthetic construct
GCRPCSE

SEQ ID NO: 39481 - protein, 7 aa, synthetic construct
KSDFTTY

SEQ ID NO: 39482 - protein, 7 aa, synthetic construct
LPRAGDW

SEQ ID NO: 39483 - protein, 7 aa, synthetic construct
FFAGIIA

SEQ ID NO: 39484 - protein, 7 aa, synthetic construct
YYSGVIE

SEQ ID NO: 39485 - protein, 7 aa, synthetic construct
CRNGTTP

SEQ ID NO: 39486 - protein, 7 aa, synthetic construct
CLKSQSY

SEQ ID NO: 39487 - protein, 7 aa, synthetic construct
YSRIGPV

SEQ ID NO: 39488 - protein, 7 aa, synthetic construct
PRDVCPK

SEQ ID NO: 39489 - protein, 7 aa, synthetic construct
YFHGIPD

SEQ ID NO: 39490 - protein, 7 aa, synthetic construct
YFTNVRE

SEQ ID NO: 39491 - protein, 7 aa, synthetic construct
GGGSSHW

SEQ ID NO: 39492 - protein, 7 aa, synthetic construct
YWSGTVS

SEQ ID NO: 39493 - protein, 7 aa, synthetic construct
CKPMKLD

SEQ ID NO: 39494 - protein, 7 aa, synthetic construct
CKIPSAG

SEQ ID NO: 39495 - protein, 7 aa, synthetic construct
CKGLPVP

SEQ ID NO: 39496 - protein, 7 aa, synthetic construct
LRDGTMA

SEQ ID NO: 39497 - protein, 7 aa, synthetic construct
GSGTKCG

SEQ ID NO: 39498 - protein, 7 aa, synthetic construct
CKTPDRA

SEQ ID NO: 39499 - protein, 7 aa, synthetic construct
CKPQNSS

SEQ ID NO: 39500 - protein, 7 aa, synthetic construct
YWSGVGA

SEQ ID NO: 39501 - protein, 7 aa, synthetic construct
YSRIMPN

SEQ ID NO: 39502 - protein, 7 aa, synthetic construct
CPPKGPS

SEQ ID NO: 39503 - protein, 7 aa, synthetic construct
CNSQKLG

SEQ ID NO: 39504 - protein, 7 aa, synthetic construct
TRDGYNA

SEQ ID NO: 39505 - protein, 7 aa, synthetic construct
WAPMCKA

SEQ ID NO: 39506 - protein, 7 aa, synthetic construct
CNQETTR

SEQ ID NO: 39507 - protein, 7 aa, synthetic construct
ETGMCKP

SEQ ID NO: 39508 - protein, 7 aa, synthetic construct
YFAGVRD

SEQ ID NO: 39509 - protein, 7 aa, synthetic construct
YFHGKHD

SEQ ID NO: 39510 - protein, 7 aa, synthetic construct
FWSGVTE

SEQ ID NO: 39511 - protein, 7 aa, synthetic construct
INGGKCD

SEQ ID NO: 39512 - protein, 7 aa, synthetic construct
YWHGVSE

SEQ ID NO: 39513 - protein, 7 aa, synthetic construct
YWSGVGE

SEQ ID NO: 39514 - protein, 7 aa, synthetic construct
GGEGIRW

SEQ ID NO: 39515 - protein, 7 aa, synthetic construct
YFAGRAD

SEQ ID NO: 39516 - protein, 7 aa, synthetic construct
CKFPVME

SEQ ID NO: 39517 - protein, 7 aa, synthetic construct
FFSGQIE

SEQ ID NO: 39518 - protein, 7 aa, synthetic construct
PYARSAD

SEQ ID NO: 39519 - protein, 7 aa, synthetic construct
YFHGLRE

SEQ ID NO: 39520 - protein, 7 aa, synthetic construct
WWGGVKE

SEQ ID NO: 39521 - protein, 7 aa, synthetic construct
RGEFVPF

SEQ ID NO: 39522 - protein, 7 aa, synthetic construct
GGEGSKW

SEQ ID NO: 39523 - protein, 7 aa, synthetic construct
CKTKSQD

SEQ ID NO: 39524 - protein, 7 aa, synthetic construct
PYAKSSE

SEQ ID NO: 39525 - protein, 7 aa, synthetic construct
LSKVGFD

SEQ ID NO: 39526 - protein, 7 aa, synthetic construct
PMGSNTW

SEQ ID NO: 39527 - protein, 7 aa, synthetic construct
YHRLDPN

SEQ ID NO: 39528 - protein, 7 aa, synthetic construct
HLASHDW

SEQ ID NO: 39529 - protein, 7 aa, synthetic construct
HPSRCPE

SEQ ID NO: 39530 - protein, 7 aa, synthetic construct
TWTGENA

SEQ ID NO: 39531 - protein, 7 aa, synthetic construct
DMQSNLW

SEQ ID NO: 39532 - protein, 7 aa, synthetic construct
RSNFVFP

SEQ ID NO: 39533 - protein, 7 aa, synthetic construct
GSEHVRW

SEQ ID NO: 39534 - protein, 7 aa, synthetic construct
RGPDTFP

SEQ ID NO: 39535 - protein, 7 aa, synthetic construct
DPSSSKW

SEQ ID NO: 39536 - protein, 7 aa, synthetic construct
CAPMLHE

SEQ ID NO: 39537 - protein, 7 aa, synthetic construct
YFHGQLD

SEQ ID NO: 39538 - protein, 7 aa, synthetic construct
CKPGTPA

SEQ ID NO: 39539 - protein, 7 aa, synthetic construct
MFDGTRA

SEQ ID NO: 39540 - protein, 7 aa, synthetic construct
YVRSNPL

SEQ ID NO: 39541 - protein, 7 aa, synthetic construct
YHAKQDN

SEQ ID NO: 39542 - protein, 7 aa, synthetic construct
YFHGKSD

SEQ ID NO: 39543 - protein, 7 aa, synthetic construct
SMQARSW

SEQ ID NO: 39544 - protein, 7 aa, synthetic construct
RGDSRSW

SEQ ID NO: 39545 - protein, 7 aa, synthetic construct
QLDSRDW

SEQ ID NO: 39546 - protein, 7 aa, synthetic construct
LHRLHPD

SEQ ID NO: 39547 - protein, 7 aa, synthetic construct
NMEDRKW

SEQ ID NO: 39548 - protein, 7 aa, synthetic construct
SMQDRTW

SEQ ID NO: 39549 - protein, 7 aa, synthetic construct
FFTGKLD

SEQ ID NO: 39550 - protein, 7 aa, synthetic construct
YSRLQST

SEQ ID NO: 39551 - protein, 7 aa, synthetic construct
VMRDRGW

SEQ ID NO: 39552 - protein, 7 aa, synthetic construct
YFTGSRE

SEQ ID NO: 39553 - protein, 7 aa, synthetic construct
RTRDSYP

SEQ ID NO: 39554 - protein, 7 aa, synthetic construct
KDGFSGW

SEQ ID NO: 39555 - protein, 7 aa, synthetic construct
CKPPSGP

SEQ ID NO: 39556 - protein, 7 aa, synthetic construct
VMDSRDW

SEQ ID NO: 39557 - protein, 7 aa, synthetic construct
HRSTNGV

SEQ ID NO: 39558 - protein, 7 aa, synthetic construct
KPANYDC

SEQ ID NO: 39559 - protein, 7 aa, synthetic construct
CSNKQTP

SEQ ID NO: 39560 - protein, 7 aa, synthetic construct
YYSRIIE

SEQ ID NO: 39561 - protein, 7 aa, synthetic construct
YFEGRID

SEQ ID NO: 39562 - protein, 7 aa, synthetic construct
YARLSPL

SEQ ID NO: 39563 - protein, 7 aa, synthetic construct
RTLDCDR

SEQ ID NO: 39564 - protein, 7 aa, synthetic construct
CKPGAGT

SEQ ID NO: 39565 - protein, 7 aa, synthetic construct
CGKRDPD

SEQ ID NO: 39566 - protein, 7 aa, synthetic construct
CKPGPGM

SEQ ID NO: 39567 - protein, 7 aa, synthetic construct
YIKSQTC

SEQ ID NO: 39568 - protein, 7 aa, synthetic construct
QNDHVRW

SEQ ID NO: 39569 - protein, 7 aa, synthetic construct
GSISSTW

SEQ ID NO: 39570 - protein, 7 aa, synthetic construct
VMGDRKW

SEQ ID NO: 39571 - protein, 7 aa, synthetic construct
CKRGLPE

SEQ ID NO: 39572 - protein, 7 aa, synthetic construct
CKPSPLE

SEQ ID NO: 39573 - protein, 7 aa, synthetic construct
WWSQVKE

SEQ ID NO: 39574 - protein, 7 aa, synthetic construct
SMQDRLW

SEQ ID NO: 39575 - protein, 7 aa, synthetic construct
YFTGEME

SEQ ID NO: 39576 - protein, 7 aa, synthetic construct
WFSGKID

SEQ ID NO: 39577 - protein, 7 aa, synthetic construct
VPDSVRW

SEQ ID NO: 39578 - protein, 7 aa, synthetic construct
GSGQSSW

SEQ ID NO: 39579 - protein, 7 aa, synthetic construct
KKYEINN

SEQ ID NO: 39580 - protein, 7 aa, synthetic construct
CRDKNVE

SEQ ID NO: 39581 - protein, 7 aa, synthetic construct
CKSEMKM

SEQ ID NO: 39582 - protein, 7 aa, synthetic construct
YVRFDQG

SEQ ID NO: 39583 - protein, 7 aa, synthetic construct
GSNTSRW

SEQ ID NO: 39584 - protein, 7 aa, synthetic construct
RGVDMYP

SEQ ID NO: 39585 - protein, 7 aa, synthetic construct
YHARQAN

SEQ ID NO: 39586 - protein, 7 aa, synthetic construct
LKKPCLT

SEQ ID NO: 39587 - protein, 7 aa, synthetic construct
CKPPPIE

SEQ ID NO: 39588 - protein, 7 aa, synthetic construct
KDDYSYY

SEQ ID NO: 39589 - protein, 7 aa, synthetic construct
YARGSPN

SEQ ID NO: 39590 - protein, 7 aa, synthetic construct
RLPDVYP

SEQ ID NO: 39591 - protein, 7 aa, synthetic construct
YSKYCVN

SEQ ID NO: 39592 - protein, 7 aa, synthetic construct
SMQDRKW

SEQ ID NO: 39593 - protein, 7 aa, synthetic construct
RTYDVYP

SEQ ID NO: 39594 - protein, 7 aa, synthetic construct
FWAGVKD

SEQ ID NO: 39595 - protein, 7 aa, synthetic construct
YVRFDAN

SEQ ID NO: 39596 - protein, 7 aa, synthetic construct
MLSDRLW

SEQ ID NO: 39597 - protein, 7 aa, synthetic construct
REDMVSW

SEQ ID NO: 39598 - protein, 7 aa, synthetic construct
LARSGWD

SEQ ID NO: 39599 - protein, 7 aa, synthetic construct
YFSGRSD

SEQ ID NO: 39600 - protein, 7 aa, synthetic construct
PVPDCLA

SEQ ID NO: 39601 - protein, 7 aa, synthetic construct
PYAKSAN

SEQ ID NO: 39602 - protein, 7 aa, synthetic construct
CQSKTGH

SEQ ID NO: 39603 - protein, 7 aa, synthetic construct
IPRTCPA

SEQ ID NO: 39604 - protein, 7 aa, synthetic construct
YWSGTMA

SEQ ID NO: 39605 - protein, 7 aa, synthetic construct
YVRSCPM

SEQ ID NO: 39606 - protein, 7 aa, synthetic construct
IDEWKTW

SEQ ID NO: 39607 - protein, 7 aa, synthetic construct
TPDSVRW

SEQ ID NO: 39608 - protein, 7 aa, synthetic construct
MTGISCL

SEQ ID NO: 39609 - protein, 7 aa, synthetic construct
SMMDRSW

SEQ ID NO: 39610 - protein, 7 aa, synthetic construct
DLKSANW

SEQ ID NO: 39611 - protein, 7 aa, synthetic construct
GKLGSCD

SEQ ID NO: 39612 - protein, 7 aa, synthetic construct
RDGASGW

SEQ ID NO: 39613 - protein, 7 aa, synthetic construct
IASRCPH

SEQ ID NO: 39614 - protein, 7 aa, synthetic construct
GVEHVRW

SEQ ID NO: 39615 - protein, 7 aa, synthetic construct
YWTGMTS

SEQ ID NO: 39616 - protein, 7 aa, synthetic construct
YFSGVRN

SEQ ID NO: 39617 - protein, 7 aa, synthetic construct
GGASSRW

SEQ ID NO: 39618 - protein, 7 aa, synthetic construct
YFSGTHQ

SEQ ID NO: 39619 - protein, 7 aa, synthetic construct
YWTGMQD

SEQ ID NO: 39620 - protein, 7 aa, synthetic construct
FSRVQPN

SEQ ID NO: 39621 - protein, 7 aa, synthetic construct
RSIDAFP

SEQ ID NO: 39622 - protein, 7 aa, synthetic construct
YFHGKQD

SEQ ID NO: 39623 - protein, 7 aa, synthetic construct
GDGNSRW

SEQ ID NO: 39624 - protein, 7 aa, synthetic construct
YYTGVLE

SEQ ID NO: 39625 - protein, 7 aa, synthetic construct
RNGTSAW

SEQ ID NO: 39626 - protein, 7 aa, synthetic construct
YFTGVAT

SEQ ID NO: 39627 - protein, 7 aa, synthetic construct
CKPLQPA

SEQ ID NO: 39628 - protein, 7 aa, synthetic construct
RAFDSYP

SEQ ID NO: 39629 - protein, 7 aa, synthetic construct
CVQTKKE

SEQ ID NO: 39630 - protein, 7 aa, synthetic construct
YFSGRPN

SEQ ID NO: 39631 - protein, 7 aa, synthetic construct
PMQDRSW

SEQ ID NO: 39632 - protein, 7 aa, synthetic construct
YETGCKE

SEQ ID NO: 39633 - protein, 7 aa, synthetic construct
GDEWKTW

SEQ ID NO: 39634 - protein, 7 aa, synthetic construct
LDDWTTY

SEQ ID NO: 39635 - protein, 7 aa, synthetic construct
YCKSQSY

SEQ ID NO: 39636 - protein, 7 aa, synthetic construct
YFHGTVE

SEQ ID NO: 39637 - protein, 7 aa, synthetic construct
YHIKSCD

SEQ ID NO: 39638 - protein, 7 aa, synthetic construct
YWSGVQV

SEQ ID NO: 39639 - protein, 7 aa, synthetic construct
FFSGVRD

SEQ ID NO: 39640 - protein, 7 aa, synthetic construct
MLSDRTW

SEQ ID NO: 39641 - protein, 7 aa, synthetic construct
WTQACPK

SEQ ID NO: 39642 - protein, 7 aa, synthetic construct
LSRVAFD

SEQ ID NO: 39643 - protein, 7 aa, synthetic construct
YFTGRND

SEQ ID NO: 39644 - protein, 7 aa, synthetic construct
ERKVHPQ

SEQ ID NO: 39645 - protein, 7 aa, synthetic construct
YVRSQPH

SEQ ID NO: 39646 - protein, 7 aa, synthetic construct
YFTGTHT

SEQ ID NO: 39647 - protein, 7 aa, synthetic construct
SAQTCKP

SEQ ID NO: 39648 - protein, 7 aa, synthetic construct
YWAGITE

SEQ ID NO: 39649 - protein, 7 aa, synthetic construct
CKEEKKE

SEQ ID NO: 39650 - protein, 7 aa, synthetic construct
YYSGVMA

SEQ ID NO: 39651 - protein, 7 aa, synthetic construct
IPCKPCG

SEQ ID NO: 39652 - protein, 7 aa, synthetic construct
TQIAPDC

SEQ ID NO: 39653 - protein, 7 aa, synthetic construct
WWHGIPE

SEQ ID NO: 39654 - protein, 7 aa, synthetic construct
RGHEGYF

SEQ ID NO: 39655 - protein, 7 aa, synthetic construct
RDNTVYP

SEQ ID NO: 39656 - protein, 7 aa, synthetic construct
YHKGGCE

SEQ ID NO: 39657 - protein, 7 aa, synthetic construct
GGSTSTW

SEQ ID NO: 39658 - protein, 7 aa, synthetic construct
CMKTPER

SEQ ID NO: 39659 - protein, 7 aa, synthetic construct
GGAGSHW

SEQ ID NO: 39660 - protein, 7 aa, synthetic construct
CGKLKPE

SEQ ID NO: 39661 - protein, 7 aa, synthetic construct
CKPVRGD

SEQ ID NO: 39662 - protein, 7 aa, synthetic construct
CKPQTPQ

SEQ ID NO: 39663 - protein, 7 aa, synthetic construct
YSRLHQL

SEQ ID NO: 39664 - protein, 7 aa, synthetic construct
WWSGVQL

SEQ ID NO: 39665 - protein, 7 aa, synthetic construct
YWSGTRE

SEQ ID NO: 39666 - protein, 7 aa, synthetic construct
GGGVVRW

SEQ ID NO: 39667 - protein, 7 aa, synthetic construct
YHAKSPC

SEQ ID NO: 39668 - protein, 7 aa, synthetic construct
CKSDHKP

SEQ ID NO: 39669 - protein, 7 aa, synthetic construct
GDEWETY

SEQ ID NO: 39670 - protein, 7 aa, synthetic construct
RDQFTSY

SEQ ID NO: 39671 - protein, 7 aa, synthetic construct
CVKPMTA

SEQ ID NO: 39672 - protein, 7 aa, synthetic construct
CKPDEFG

SEQ ID NO: 39673 - protein, 7 aa, synthetic construct
GSPGAHW

SEQ ID NO: 39674 - protein, 7 aa, synthetic construct
CSPYLHE

SEQ ID NO: 39675 - protein, 7 aa, synthetic construct
YFTGTWS

SEQ ID NO: 39676 - protein, 7 aa, synthetic construct
YHRLNDW

SEQ ID NO: 39677 - protein, 7 aa, synthetic construct
VDGSCKA

SEQ ID NO: 39678 - protein, 7 aa, synthetic construct
CKKYGGD

SEQ ID NO: 39679 - protein, 7 aa, synthetic construct
IMLDRGW

SEQ ID NO: 39680 - protein, 7 aa, synthetic construct
YFTGRFD

SEQ ID NO: 39681 - protein, 7 aa, synthetic construct
YVRSGPD

SEQ ID NO: 39682 - protein, 7 aa, synthetic construct
YHRLQST

SEQ ID NO: 39683 - protein, 7 aa, synthetic construct
YFTGSVD

SEQ ID NO: 39684 - protein, 7 aa, synthetic construct
RDGNSRW

SEQ ID NO: 39685 - protein, 7 aa, synthetic construct
WFSGKVE

SEQ ID NO: 39686 - protein, 7 aa, synthetic construct
YWTGTME

SEQ ID NO: 39687 - protein, 7 aa, synthetic construct
GGSGSTW

SEQ ID NO: 39688 - protein, 7 aa, synthetic construct
YWHGIPE

SEQ ID NO: 39689 - protein, 7 aa, synthetic construct
CKDSARL

SEQ ID NO: 39690 - protein, 7 aa, synthetic construct
CTSKLGH

SEQ ID NO: 39691 - protein, 7 aa, synthetic construct
WVRSDVK

SEQ ID NO: 39692 - protein, 7 aa, synthetic construct
YWTGMTE

SEQ ID NO: 39693 - protein, 7 aa, synthetic construct
YFSGMHS

SEQ ID NO: 39694 - protein, 7 aa, synthetic construct
YFHGTVD

SEQ ID NO: 39695 - protein, 7 aa, synthetic construct
YFQGVRE

SEQ ID NO: 39696 - protein, 7 aa, synthetic construct
RSGPCPF

SEQ ID NO: 39697 - protein, 7 aa, synthetic construct
WHPMCKA

SEQ ID NO: 39698 - protein, 7 aa, synthetic construct
RPETCSP

SEQ ID NO: 39699 - protein, 7 aa, synthetic construct
GDEWQPY

SEQ ID NO: 39700 - protein, 7 aa, synthetic construct
VMYDSYP

SEQ ID NO: 39701 - protein, 7 aa, synthetic construct
GCKPCPS

SEQ ID NO: 39702 - protein, 7 aa, synthetic construct
CKPGMGE

SEQ ID NO: 39703 - protein, 7 aa, synthetic construct
GCRHGDC

SEQ ID NO: 39704 - protein, 7 aa, synthetic construct
YWAGVSA

SEQ ID NO: 39705 - protein, 7 aa, synthetic construct
YWSGKID

SEQ ID NO: 39706 - protein, 7 aa, synthetic construct
YFQGKRD

SEQ ID NO: 39707 - protein, 7 aa, synthetic construct
DLRDVKW

SEQ ID NO: 39708 - protein, 7 aa, synthetic construct
DAFRGFD

SEQ ID NO: 39709 - protein, 7 aa, synthetic construct
CKDGTTS

SEQ ID NO: 39710 - protein, 7 aa, synthetic construct
KDGYSMY

SEQ ID NO: 39711 - protein, 7 aa, synthetic construct
TWDGMIA

SEQ ID NO: 39712 - protein, 7 aa, synthetic construct
KHDFTGC

SEQ ID NO: 39713 - protein, 7 aa, synthetic construct
IGRTGWD

SEQ ID NO: 39714 - protein, 7 aa, synthetic construct
TLSSRDW

SEQ ID NO: 39715 - protein, 7 aa, synthetic construct
CKDNRAL

SEQ ID NO: 39716 - protein, 7 aa, synthetic construct
YWSGQKD

SEQ ID NO: 39717 - protein, 7 aa, synthetic construct
RTYDSIA

SEQ ID NO: 39718 - protein, 7 aa, synthetic construct
VSTHSCA

SEQ ID NO: 39719 - protein, 7 aa, synthetic construct
YYSGQKE

SEQ ID NO: 39720 - protein, 7 aa, synthetic construct
CKKPSPE

SEQ ID NO: 39721 - protein, 7 aa, synthetic construct
YFTRVME

SEQ ID NO: 39722 - protein, 7 aa, synthetic construct
YYTGVSL

SEQ ID NO: 39723 - protein, 7 aa, synthetic construct
YFSGLRE

SEQ ID NO: 39724 - protein, 7 aa, synthetic construct
CAPYLPE

SEQ ID NO: 39725 - protein, 7 aa, synthetic construct
GDGSCKA

SEQ ID NO: 39726 - protein, 7 aa, synthetic construct
YWTGMHE

SEQ ID NO: 39727 - protein, 7 aa, synthetic construct
RLESISW

SEQ ID NO: 39728 - protein, 7 aa, synthetic construct
YFTGMQE

SEQ ID NO: 39729 - protein, 7 aa, synthetic construct
YWQGVRE

SEQ ID NO: 39730 - protein, 7 aa, synthetic construct
YFTAVKE

SEQ ID NO: 39731 - protein, 7 aa, synthetic construct
RDGNSMW

SEQ ID NO: 39732 - protein, 7 aa, synthetic construct
CKTKSTE

SEQ ID NO: 39733 - protein, 7 aa, synthetic construct
RNDFSTY

SEQ ID NO: 39734 - protein, 7 aa, synthetic construct
CKRDAES

SEQ ID NO: 39735 - protein, 7 aa, synthetic construct
CTSKTTH

SEQ ID NO: 39736 - protein, 7 aa, synthetic construct
LRSGCGP

SEQ ID NO: 39737 - protein, 7 aa, synthetic construct
VPSSAIW

SEQ ID NO: 39738 - protein, 7 aa, synthetic construct
SMSDRSW

SEQ ID NO: 39739 - protein, 7 aa, synthetic construct
FWTGKIE

SEQ ID NO: 39740 - protein, 7 aa, synthetic construct
YFHGQLE

SEQ ID NO: 39741 - protein, 7 aa, synthetic construct
GAPACKE

SEQ ID NO: 39742 - protein, 7 aa, synthetic construct
REDYSTY

SEQ ID NO: 39743 - protein, 7 aa, synthetic construct
VGNRGWD

SEQ ID NO: 39744 - protein, 7 aa, synthetic construct
CKSKCLP

SEQ ID NO: 39745 - protein, 7 aa, synthetic construct
GLADRSW

SEQ ID NO: 39746 - protein, 7 aa, synthetic construct
DYASRDW

SEQ ID NO: 39747 - protein, 7 aa, synthetic construct
YFTGVTV

SEQ ID NO: 39748 - protein, 7 aa, synthetic construct
KDDYNVY

SEQ ID NO: 39749 - protein, 7 aa, synthetic construct
GCGGGGG

SEQ ID NO: 39750 - protein, 7 aa, synthetic construct
YVRSDDS

SEQ ID NO: 39751 - protein, 7 aa, synthetic construct
FSKHNYN

SEQ ID NO: 39752 - protein, 7 aa, synthetic construct
CSKLKPG

SEQ ID NO: 39753 - protein, 7 aa, synthetic construct
GNGTSRW

SEQ ID NO: 39754 - protein, 7 aa, synthetic construct
CKAPDKG

SEQ ID NO: 39755 - protein, 7 aa, synthetic construct
YHRLSRD

SEQ ID NO: 39756 - protein, 7 aa, synthetic construct
YFSGMME

SEQ ID NO: 39757 - protein, 7 aa, synthetic construct
YWTGTSA

SEQ ID NO: 39758 - protein, 7 aa, synthetic construct
YFTGCRD

SEQ ID NO: 39759 - protein, 7 aa, synthetic construct
RSGPCAI

SEQ ID NO: 39760 - protein, 7 aa, synthetic construct
HLASHTW

SEQ ID NO: 39761 - protein, 7 aa, synthetic construct
PEAGCKD

SEQ ID NO: 39762 - protein, 7 aa, synthetic construct
KDDFSMY

SEQ ID NO: 39763 - protein, 7 aa, synthetic construct
KRDITCA

SEQ ID NO: 39764 - protein, 7 aa, synthetic construct
CKPRTGE

SEQ ID NO: 39765 - protein, 7 aa, synthetic construct
MFDGTEA

SEQ ID NO: 39766 - protein, 7 aa, synthetic construct
YFSGVPT

SEQ ID NO: 39767 - protein, 7 aa, synthetic construct
RDEFNSF

SEQ ID NO: 39768 - protein, 7 aa, synthetic construct
YTRLDVL

SEQ ID NO: 39769 - protein, 7 aa, synthetic construct
YFAGVVG

SEQ ID NO: 39770 - protein, 7 aa, synthetic construct
QDGSSSW

SEQ ID NO: 39771 - protein, 7 aa, synthetic construct
CKPDYRE

SEQ ID NO: 39772 - protein, 7 aa, synthetic construct
IGERGWD

SEQ ID NO: 39773 - protein, 7 aa, synthetic construct
YYTGVTR

SEQ ID NO: 39774 - protein, 7 aa, synthetic construct
MTGTSCN

SEQ ID NO: 39775 - protein, 7 aa, synthetic construct
YWQGKIA

SEQ ID NO: 39776 - protein, 7 aa, synthetic construct
CKGTDGP

SEQ ID NO: 39777 - protein, 7 aa, synthetic construct
FLKSQSY

SEQ ID NO: 39778 - protein, 7 aa, synthetic construct
CKSGQGA

SEQ ID NO: 39779 - protein, 7 aa, synthetic construct
RGHDVFP

SEQ ID NO: 39780 - protein, 7 aa, synthetic construct
LIKPCLT

SEQ ID NO: 39781 - protein, 7 aa, synthetic construct
YFTGLHN

SEQ ID NO: 39782 - protein, 7 aa, synthetic construct
PMPDRSW

SEQ ID NO: 39783 - protein, 7 aa, synthetic construct
YHRAGLD

SEQ ID NO: 39784 - protein, 7 aa, synthetic construct
YFSGMTE

SEQ ID NO: 39785 - protein, 7 aa, synthetic construct
YWGGVLE

SEQ ID NO: 39786 - protein, 7 aa, synthetic construct
DLNSAKW

SEQ ID NO: 39787 - protein, 7 aa, synthetic construct
VSTHMCA

SEQ ID NO: 39788 - protein, 7 aa, synthetic construct
RDGESAW

SEQ ID NO: 39789 - protein, 7 aa, synthetic construct
REGTSLW

SEQ ID NO: 39790 - protein, 7 aa, synthetic construct
CKSDSKV

SEQ ID NO: 39791 - protein, 7 aa, synthetic construct
YSKIGWD

SEQ ID NO: 39792 - protein, 7 aa, synthetic construct
YTRLNPM

SEQ ID NO: 39793 - protein, 7 aa, synthetic construct
MAGTSCL

SEQ ID NO: 39794 - protein, 7 aa, synthetic construct
CKPGSPM

SEQ ID NO: 39795 - protein, 7 aa, synthetic construct
KDDYVFF

SEQ ID NO: 39796 - protein, 7 aa, synthetic construct
KDDWNTW

SEQ ID NO: 39797 - protein, 7 aa, synthetic construct
YVKLQPN

SEQ ID NO: 39798 - protein, 7 aa, synthetic construct
GIRNVMY

SEQ ID NO: 39799 - protein, 7 aa, synthetic construct
CPRENDG

SEQ ID NO: 39800 - protein, 7 aa, synthetic construct
WVRSQPG

SEQ ID NO: 39801 - protein, 7 aa, synthetic construct
YFSGVTV

SEQ ID NO: 39802 - protein, 7 aa, synthetic construct
YFSGKPE

SEQ ID NO: 39803 - protein, 7 aa, synthetic construct
WWSGVTE

SEQ ID NO: 39804 - protein, 7 aa, synthetic construct
REDTIYW

SEQ ID NO: 39805 - protein, 7 aa, synthetic construct
YFSGVTP

SEQ ID NO: 39806 - protein, 7 aa, synthetic construct
YWSGTIE

SEQ ID NO: 39807 - protein, 7 aa, synthetic construct
REYNVYP

SEQ ID NO: 39808 - protein, 7 aa, synthetic construct
IGSKGWD

SEQ ID NO: 39809 - protein, 7 aa, synthetic construct
CKRTSGE

SEQ ID NO: 39810 - protein, 7 aa, synthetic construct
YWTGMME

SEQ ID NO: 39811 - protein, 7 aa, synthetic construct
VALMGIG

SEQ ID NO: 39812 - protein, 7 aa, synthetic construct
YHRQSDN

SEQ ID NO: 39813 - protein, 7 aa, synthetic construct
YWSGTTD

SEQ ID NO: 39814 - protein, 7 aa, synthetic construct
YEPGCAE

SEQ ID NO: 39815 - protein, 7 aa, synthetic construct
CKLLGKD

SEQ ID NO: 39816 - protein, 7 aa, synthetic construct
YLKSDAY

SEQ ID NO: 39817 - protein, 7 aa, synthetic construct
YVRSDQT

SEQ ID NO: 39818 - protein, 7 aa, synthetic construct
LKDGTPA

SEQ ID NO: 39819 - protein, 7 aa, synthetic construct
CRPPEVE

SEQ ID NO: 39820 - protein, 7 aa, synthetic construct
CKPECGG

SEQ ID NO: 39821 - protein, 7 aa, synthetic construct
YFSGTRT

SEQ ID NO: 39822 - protein, 7 aa, synthetic construct
FWAGIRE

SEQ ID NO: 39823 - protein, 7 aa, synthetic construct
RNEYSTY

SEQ ID NO: 39824 - protein, 7 aa, synthetic construct
YFSGIQP

SEQ ID NO: 39825 - protein, 7 aa, synthetic construct
TVYDSFA

SEQ ID NO: 39826 - protein, 7 aa, synthetic construct
MTTTSCL

SEQ ID NO: 39827 - protein, 7 aa, synthetic construct
YTRLDNM

SEQ ID NO: 39828 - protein, 7 aa, synthetic construct
YWQGKID

SEQ ID NO: 39829 - protein, 7 aa, synthetic construct
GRPGCPF

SEQ ID NO: 39830 - protein, 7 aa, synthetic construct
CKPNPAP

SEQ ID NO: 39831 - protein, 7 aa, synthetic construct
YSRASDN

SEQ ID NO: 39832 - protein, 7 aa, synthetic construct
YFSGQHH

SEQ ID NO: 39833 - protein, 7 aa, synthetic construct
CKSSKQD

SEQ ID NO: 39834 - protein, 7 aa, synthetic construct
YHKYQEN

SEQ ID NO: 39835 - protein, 7 aa, synthetic construct
YYSGIHS

SEQ ID NO: 39836 - protein, 7 aa, synthetic construct
YWEGVKS

SEQ ID NO: 39837 - protein, 7 aa, synthetic construct
YARLSPI

SEQ ID NO: 39838 - protein, 7 aa, synthetic construct
FFTGTVS

SEQ ID NO: 39839 - protein, 7 aa, synthetic construct
CKPGSSG

SEQ ID NO: 39840 - protein, 7 aa, synthetic construct
CRPQMAS

SEQ ID NO: 39841 - protein, 7 aa, synthetic construct
TDGTSLW

SEQ ID NO: 39842 - protein, 7 aa, synthetic construct
WFSGRVE

SEQ ID NO: 39843 - protein, 7 aa, synthetic construct
WLPMCKA

SEQ ID NO: 39844 - protein, 7 aa, synthetic construct
YWSAVPE

SEQ ID NO: 39845 - protein, 7 aa, synthetic construct
GGPGSFW

SEQ ID NO: 39846 - protein, 7 aa, synthetic construct
CKDPCCT

SEQ ID NO: 39847 - protein, 7 aa, synthetic construct
CMERKPE

SEQ ID NO: 39848 - protein, 7 aa, synthetic construct
SGESRTW

SEQ ID NO: 39849 - protein, 7 aa, synthetic construct
YWAGVQE

SEQ ID NO: 39850 - protein, 7 aa, synthetic construct
VPYEGIG

SEQ ID NO: 39851 - protein, 7 aa, synthetic construct
YFAGERD

SEQ ID NO: 39852 - protein, 7 aa, synthetic construct
YVKSDKV

SEQ ID NO: 39853 - protein, 7 aa, synthetic construct
SCKERMP

SEQ ID NO: 39854 - protein, 7 aa, synthetic construct
YWQGVVE

SEQ ID NO: 39855 - protein, 7 aa, synthetic construct
RNEFSGY

SEQ ID NO: 39856 - protein, 7 aa, synthetic construct
CKPKQIE

SEQ ID NO: 39857 - protein, 7 aa, synthetic construct
CAPDWRE

SEQ ID NO: 39858 - protein, 7 aa, synthetic construct
VCKPCPI

SEQ ID NO: 39859 - protein, 7 aa, synthetic construct
RMESSDW

SEQ ID NO: 39860 - protein, 7 aa, synthetic construct
FFHGKID

SEQ ID NO: 39861 - protein, 7 aa, synthetic construct
VMSSQGW

SEQ ID NO: 39862 - protein, 7 aa, synthetic construct
YFTGQAS

SEQ ID NO: 39863 - protein, 7 aa, synthetic construct
CNKPMHA

SEQ ID NO: 39864 - protein, 7 aa, synthetic construct
GGPGSAW

SEQ ID NO: 39865 - protein, 7 aa, synthetic construct
CKADSKE

SEQ ID NO: 39866 - protein, 7 aa, synthetic construct
LEPKCKG

SEQ ID NO: 39867 - protein, 7 aa, synthetic construct
VEGVLCR

SEQ ID NO: 39868 - protein, 7 aa, synthetic construct
YFHGQMD

SEQ ID NO: 39869 - protein, 7 aa, synthetic construct
REESSRW

SEQ ID NO: 39870 - protein, 7 aa, synthetic construct
FWSGIPA

SEQ ID NO: 39871 - protein, 7 aa, synthetic construct
CNFKGPP

SEQ ID NO: 39872 - protein, 7 aa, synthetic construct
REDAIRW

SEQ ID NO: 39873 - protein, 7 aa, synthetic construct
KYESSVW

SEQ ID NO: 39874 - protein, 7 aa, synthetic construct
YTGTSCL

SEQ ID NO: 39875 - protein, 7 aa, synthetic construct
PYARSPS

SEQ ID NO: 39876 - protein, 7 aa, synthetic construct
CAAERLG

SEQ ID NO: 39877 - protein, 7 aa, synthetic construct
IESYNGR

SEQ ID NO: 39878 - protein, 7 aa, synthetic construct
YARGSCD

SEQ ID NO: 39879 - protein, 7 aa, synthetic construct
YWSQIKD

SEQ ID NO: 39880 - protein, 7 aa, synthetic construct
YYHGIQA

SEQ ID NO: 39881 - protein, 7 aa, synthetic construct
RNEFTVY

SEQ ID NO: 39882 - protein, 7 aa, synthetic construct
RDDYQYY

SEQ ID NO: 39883 - protein, 7 aa, synthetic construct
CKPPKLE

SEQ ID NO: 39884 - protein, 7 aa, synthetic construct
REDTSYW

SEQ ID NO: 39885 - protein, 7 aa, synthetic construct
RNEFTSF

SEQ ID NO: 39886 - protein, 7 aa, synthetic construct
CKSTNGI

SEQ ID NO: 39887 - protein, 7 aa, synthetic construct
FCKSNAN

SEQ ID NO: 39888 - protein, 7 aa, synthetic construct
SYAFSRE

SEQ ID NO: 39889 - protein, 7 aa, synthetic construct
DYADRKW

SEQ ID NO: 39890 - protein, 7 aa, synthetic construct
GDGRSHW

SEQ ID NO: 39891 - protein, 7 aa, synthetic construct
FFSGQRE

SEQ ID NO: 39892 - protein, 7 aa, synthetic construct
YWSGTNA

SEQ ID NO: 39893 - protein, 7 aa, synthetic construct
NDATSKW

SEQ ID NO: 39894 - protein, 7 aa, synthetic construct
REDVVYW

SEQ ID NO: 39895 - protein, 7 aa, synthetic construct
LREGECK

SEQ ID NO: 39896 - protein, 7 aa, synthetic construct
CRSRVDE

SEQ ID NO: 39897 - protein, 7 aa, synthetic construct
FFHGKIE

SEQ ID NO: 39898 - protein, 7 aa, synthetic construct
CKPHRLE

SEQ ID NO: 39899 - protein, 7 aa, synthetic construct
RSEYHTY

SEQ ID NO: 39900 - protein, 7 aa, synthetic construct
YFSAVRA

SEQ ID NO: 39901 - protein, 7 aa, synthetic construct
CKHQQVE

SEQ ID NO: 39902 - protein, 7 aa, synthetic construct
YYTGMVN

SEQ ID NO: 39903 - protein, 7 aa, synthetic construct
YKADAPC

SEQ ID NO: 39904 - protein, 7 aa, synthetic construct
IQFSPLD

SEQ ID NO: 39905 - protein, 7 aa, synthetic construct
TSSGGCQ

SEQ ID NO: 39906 - protein, 7 aa, synthetic construct
CKPRQPE

SEQ ID NO: 39907 - protein, 7 aa, synthetic construct
CGGGKAP

SEQ ID NO: 39908 - protein, 7 aa, synthetic construct
CKPPSGI

SEQ ID NO: 39909 - protein, 7 aa, synthetic construct
CKEGTRM

SEQ ID NO: 39910 - protein, 7 aa, synthetic construct
CRPGSPG

SEQ ID NO: 39911 - protein, 7 aa, synthetic construct
CKPEMRP

SEQ ID NO: 39912 - protein, 7 aa, synthetic construct
GSETSMW

SEQ ID NO: 39913 - protein, 7 aa, synthetic construct
VGMRCPP

SEQ ID NO: 39914 - protein, 7 aa, synthetic construct
RGGDRSW

SEQ ID NO: 39915 - protein, 7 aa, synthetic construct
RTYTEFP

SEQ ID NO: 39916 - protein, 7 aa, synthetic construct
YFQGIHA

SEQ ID NO: 39917 - protein, 7 aa, synthetic construct
MCRPCSE

SEQ ID NO: 39918 - protein, 7 aa, synthetic construct
STPMCKA

SEQ ID NO: 39919 - protein, 7 aa, synthetic construct
FFSGVQA

SEQ ID NO: 39920 - protein, 7 aa, synthetic construct
RNATSAW

SEQ ID NO: 39921 - protein, 7 aa, synthetic construct
KDALKCT

SEQ ID NO: 39922 - protein, 7 aa, synthetic construct
YFTGMIQ

SEQ ID NO: 39923 - protein, 7 aa, synthetic construct
GKGSCEQ

SEQ ID NO: 39924 - protein, 7 aa, synthetic construct
YWTKIPE

SEQ ID NO: 39925 - protein, 7 aa, synthetic construct
CAPDYVE

SEQ ID NO: 39926 - protein, 7 aa, synthetic construct
VKTDRCA

SEQ ID NO: 39927 - protein, 7 aa, synthetic construct
YSRISGN

SEQ ID NO: 39928 - protein, 7 aa, synthetic construct
YFSGIHT

SEQ ID NO: 39929 - protein, 7 aa, synthetic construct
CKDDSRA

SEQ ID NO: 39930 - protein, 7 aa, synthetic construct
RTPTCAG

SEQ ID NO: 39931 - protein, 7 aa, synthetic construct
CAPYLVE

SEQ ID NO: 39932 - protein, 7 aa, synthetic construct
YTRLDFD

SEQ ID NO: 39933 - protein, 7 aa, synthetic construct
YWQGIPA

SEQ ID NO: 39934 - protein, 7 aa, synthetic construct
YFHGKIV

SEQ ID NO: 39935 - protein, 7 aa, synthetic construct
WARGCDN

SEQ ID NO: 39936 - protein, 7 aa, synthetic construct
YWTGRQE

SEQ ID NO: 39937 - protein, 7 aa, synthetic construct
YWTGKPE

SEQ ID NO: 39938 - protein, 7 aa, synthetic construct
YWTGKAD

SEQ ID NO: 39939 - protein, 7 aa, synthetic construct
YFQGRLE

SEQ ID NO: 39940 - protein, 7 aa, synthetic construct
CSKEHIP

SEQ ID NO: 39941 - protein, 7 aa, synthetic construct
VSEFQTY

SEQ ID NO: 39942 - protein, 7 aa, synthetic construct
LARLGWD

SEQ ID NO: 39943 - protein, 7 aa, synthetic construct
WSPMCKA

SEQ ID NO: 39944 - protein, 7 aa, synthetic construct
YYTGIPH

SEQ ID NO: 39945 - protein, 7 aa, synthetic construct
YFSGRAQ

SEQ ID NO: 39946 - protein, 7 aa, synthetic construct
KFDNCGS

SEQ ID NO: 39947 - protein, 7 aa, synthetic construct
MDGTSLW

SEQ ID NO: 39948 - protein, 7 aa, synthetic construct
YFSGQNN

SEQ ID NO: 39949 - protein, 7 aa, synthetic construct
YFAGQIA

SEQ ID NO: 39950 - protein, 7 aa, synthetic construct
FFTGTVD

SEQ ID NO: 39951 - protein, 7 aa, synthetic construct
DLESYKW

SEQ ID NO: 39952 - protein, 7 aa, synthetic construct
FFTGRLD

SEQ ID NO: 39953 - protein, 7 aa, synthetic construct
CKPRSIE

SEQ ID NO: 39954 - protein, 7 aa, synthetic construct
IMQDRSW

SEQ ID NO: 39955 - protein, 7 aa, synthetic construct
CTSKTGN

SEQ ID NO: 39956 - protein, 7 aa, synthetic construct
MLTGKCE

SEQ ID NO: 39957 - protein, 7 aa, synthetic construct
YWHGVTE

SEQ ID NO: 39958 - protein, 7 aa, synthetic construct
CERKTDA

SEQ ID NO: 39959 - protein, 7 aa, synthetic construct
CAPTYRE

SEQ ID NO: 39960 - protein, 7 aa, synthetic construct
KDGYTVY

SEQ ID NO: 39961 - protein, 7 aa, synthetic construct
CRDVKQG

SEQ ID NO: 39962 - protein, 7 aa, synthetic construct
FFTGFID

SEQ ID NO: 39963 - protein, 7 aa, synthetic construct
RTLETFP

SEQ ID NO: 39964 - protein, 7 aa, synthetic construct
YFSGKAL

SEQ ID NO: 39965 - protein, 7 aa, synthetic construct
YSRIGPS

SEQ ID NO: 39966 - protein, 7 aa, synthetic construct
KDDYTSF

SEQ ID NO: 39967 - protein, 7 aa, synthetic construct
FCRPCPV

SEQ ID NO: 39968 - protein, 7 aa, synthetic construct
YYTGVRD

SEQ ID NO: 39969 - protein, 7 aa, synthetic construct
CAPYLHA

SEQ ID NO: 39970 - protein, 7 aa, synthetic construct
CKKLGPD

SEQ ID NO: 39971 - protein, 7 aa, synthetic construct
LCKPPLT

SEQ ID NO: 39972 - protein, 7 aa, synthetic construct
FFSGITE

SEQ ID NO: 39973 - protein, 7 aa, synthetic construct
WTPMCQA

SEQ ID NO: 39974 - protein, 7 aa, synthetic construct
CRPDVVG

SEQ ID NO: 39975 - protein, 7 aa, synthetic construct
TSECVKY

SEQ ID NO: 39976 - protein, 7 aa, synthetic construct
GSETSKW

SEQ ID NO: 39977 - protein, 7 aa, synthetic construct
YWTGKQD

SEQ ID NO: 39978 - protein, 7 aa, synthetic construct
RDGSSGW

SEQ ID NO: 39979 - protein, 7 aa, synthetic construct
YWSGQRE

SEQ ID NO: 39980 - protein, 7 aa, synthetic construct
APDTVRW

SEQ ID NO: 39981 - protein, 7 aa, synthetic construct
VGYDRGW

SEQ ID NO: 39982 - protein, 7 aa, synthetic construct
CKPGSPH

SEQ ID NO: 39983 - protein, 7 aa, synthetic construct
YWSGTTS

SEQ ID NO: 39984 - protein, 7 aa, synthetic construct
CAPSYRE

SEQ ID NO: 39985 - protein, 7 aa, synthetic construct
REYDSFP

SEQ ID NO: 39986 - protein, 7 aa, synthetic construct
KDDFMTY

SEQ ID NO: 39987 - protein, 7 aa, synthetic construct
MTGGSCL

SEQ ID NO: 39988 - protein, 7 aa, synthetic construct
RNEFQSY

SEQ ID NO: 39989 - protein, 7 aa, synthetic construct
REQTVHW

SEQ ID NO: 39990 - protein, 7 aa, synthetic construct
WLKRQDC

SEQ ID NO: 39991 - protein, 7 aa, synthetic construct
GCRMGDI

SEQ ID NO: 39992 - protein, 7 aa, synthetic construct
WWAGVKG

SEQ ID NO: 39993 - protein, 7 aa, synthetic construct
YYTGMRD

SEQ ID NO: 39994 - protein, 7 aa, synthetic construct
YFAGQVA

SEQ ID NO: 39995 - protein, 7 aa, synthetic construct
GLPTRCP

SEQ ID NO: 39996 - protein, 7 aa, synthetic construct
YFSAVRE

SEQ ID NO: 39997 - protein, 7 aa, synthetic construct
RDEGTYW

SEQ ID NO: 39998 - protein, 7 aa, synthetic construct
CAKDYRE

SEQ ID NO: 39999 - protein, 7 aa, synthetic construct
YWSGKTE

SEQ ID NO: 40000 - protein, 7 aa, synthetic construct
CKLPKSE

SEQ ID NO: 40001 - protein, 7 aa, synthetic construct
CGKGGPV

SEQ ID NO: 40002 - protein, 7 aa, synthetic construct
QMQDRSW

SEQ ID NO: 40003 - protein, 7 aa, synthetic construct
YHKNNAN

SEQ ID NO: 40004 - protein, 7 aa, synthetic construct
GGPGSVW

SEQ ID NO: 40005 - protein, 7 aa, synthetic construct
LSRASID

SEQ ID NO: 40006 - protein, 7 aa, synthetic construct
YWSGKHE

SEQ ID NO: 40007 - protein, 7 aa, synthetic construct
YYSGVIM

SEQ ID NO: 40008 - protein, 7 aa, synthetic construct
RDEFQTY

SEQ ID NO: 40009 - protein, 7 aa, synthetic construct
AGYDRHW

SEQ ID NO: 40010 - protein, 7 aa, synthetic construct
RNEFTSY

SEQ ID NO: 40011 - protein, 7 aa, synthetic construct
NGTNGRW

SEQ ID NO: 40012 - protein, 7 aa, synthetic construct
IDGKAGC

SEQ ID NO: 40013 - protein, 7 aa, synthetic construct
CKGESRS

SEQ ID NO: 40014 - protein, 7 aa, synthetic construct
CKSLKSP

SEQ ID NO: 40015 - protein, 7 aa, synthetic construct
CAPDYQE

SEQ ID NO: 40016 - protein, 7 aa, synthetic construct
CKPPPLP

SEQ ID NO: 40017 - protein, 7 aa, synthetic construct
YYTGIQE

SEQ ID NO: 40018 - protein, 7 aa, synthetic construct
PGSTRTW

SEQ ID NO: 40019 - protein, 7 aa, synthetic construct
SMQSRSW

SEQ ID NO: 40020 - protein, 7 aa, synthetic construct
MTGTSCQ

SEQ ID NO: 40021 - protein, 7 aa, synthetic construct
CAPYRHE

SEQ ID NO: 40022 - protein, 7 aa, synthetic construct
CKSDKIM

SEQ ID NO: 40023 - protein, 7 aa, synthetic construct
CRAEDKG

SEQ ID NO: 40024 - protein, 7 aa, synthetic construct
CVKDEGA

SEQ ID NO: 40025 - protein, 7 aa, synthetic construct
REGASYW

SEQ ID NO: 40026 - protein, 7 aa, synthetic construct
YWSGKQA

SEQ ID NO: 40027 - protein, 7 aa, synthetic construct
LKYSGMC

SEQ ID NO: 40028 - protein, 7 aa, synthetic construct
RDEFHVW

SEQ ID NO: 40029 - protein, 7 aa, synthetic construct
YWTGTTE

SEQ ID NO: 40030 - protein, 7 aa, synthetic construct
CRNGQPA

SEQ ID NO: 40031 - protein, 7 aa, synthetic construct
CRDENKP

SEQ ID NO: 40032 - protein, 7 aa, synthetic construct
YFAGRTS

SEQ ID NO: 40033 - protein, 7 aa, synthetic construct
FFTGKVS

SEQ ID NO: 40034 - protein, 7 aa, synthetic construct
YVRSDAG

SEQ ID NO: 40035 - protein, 7 aa, synthetic construct
CKPGEGA

SEQ ID NO: 40036 - protein, 7 aa, synthetic construct
QGESRVW

SEQ ID NO: 40037 - protein, 7 aa, synthetic construct
RLESAGW

SEQ ID NO: 40038 - protein, 7 aa, synthetic construct
CKPPMGA

SEQ ID NO: 40039 - protein, 7 aa, synthetic construct
RDGESKW

SEQ ID NO: 40040 - protein, 7 aa, synthetic construct
CKTKSQE

SEQ ID NO: 40041 - protein, 7 aa, synthetic construct
HARQSPN

SEQ ID NO: 40042 - protein, 7 aa, synthetic construct
CMSRAVA

SEQ ID NO: 40043 - protein, 7 aa, synthetic construct
YWSAVTA

SEQ ID NO: 40044 - protein, 7 aa, synthetic construct
CREGTSS

SEQ ID NO: 40045 - protein, 7 aa, synthetic construct
YWEGVKA

SEQ ID NO: 40046 - protein, 7 aa, synthetic construct
VMPSAVW

SEQ ID NO: 40047 - protein, 7 aa, synthetic construct
FKSTNGV

SEQ ID NO: 40048 - protein, 7 aa, synthetic construct
YYSGIQS

SEQ ID NO: 40049 - protein, 7 aa, synthetic construct
WSAITDC

SEQ ID NO: 40050 - protein, 7 aa, synthetic construct
LHKLSTH

SEQ ID NO: 40051 - protein, 7 aa, synthetic construct
KPDHVRW

SEQ ID NO: 40052 - protein, 7 aa, synthetic construct
YSKLGAD

SEQ ID NO: 40053 - protein, 7 aa, synthetic construct
RTYDTYP

SEQ ID NO: 40054 - protein, 7 aa, synthetic construct
YFSGVRT

SEQ ID NO: 40055 - protein, 7 aa, synthetic construct
DMLSSSW

SEQ ID NO: 40056 - protein, 7 aa, synthetic construct
CKPQWPS

SEQ ID NO: 40057 - protein, 7 aa, synthetic construct
CKPDSIG

SEQ ID NO: 40058 - protein, 7 aa, synthetic construct
MTGTSCL

SEQ ID NO: 40059 - protein, 7 aa, synthetic construct
YLKSQSI

SEQ ID NO: 40060 - protein, 7 aa, synthetic construct
CTEKTGH

SEQ ID NO: 40061 - protein, 7 aa, synthetic construct
GSEFSAF

SEQ ID NO: 40062 - protein, 7 aa, synthetic construct
KMDYSVF

SEQ ID NO: 40063 - protein, 7 aa, synthetic construct
YFTGTQL

SEQ ID NO: 40064 - protein, 7 aa, synthetic construct
KEDYVTY

SEQ ID NO: 40065 - protein, 7 aa, synthetic construct
YSRICPN

SEQ ID NO: 40066 - protein, 7 aa, synthetic construct
YWSGQIA

SEQ ID NO: 40067 - protein, 7 aa, synthetic construct
RTYETFP

SEQ ID NO: 40068 - protein, 7 aa, synthetic construct
RDYDSYP

SEQ ID NO: 40069 - protein, 7 aa, synthetic construct
YYTGFVD

SEQ ID NO: 40070 - protein, 7 aa, synthetic construct
FWHGVPD

SEQ ID NO: 40071 - protein, 7 aa, synthetic construct
RGESSSW

SEQ ID NO: 40072 - protein, 7 aa, synthetic construct
RSEFRTY

SEQ ID NO: 40073 - protein, 7 aa, synthetic construct
YWTGCME

SEQ ID NO: 40074 - protein, 7 aa, synthetic construct
WPSGSAG

SEQ ID NO: 40075 - protein, 7 aa, synthetic construct
YFTGCQA

SEQ ID NO: 40076 - protein, 7 aa, synthetic construct
GEPTCKA

SEQ ID NO: 40077 - protein, 7 aa, synthetic construct
YHRLNEH

SEQ ID NO: 40078 - protein, 7 aa, synthetic construct
GGEGTRW

SEQ ID NO: 40079 - protein, 7 aa, synthetic construct
CKPDAVR

SEQ ID NO: 40080 - protein, 7 aa, synthetic construct
MTGTSCR

SEQ ID NO: 40081 - protein, 7 aa, synthetic construct
LHKLCQD

SEQ ID NO: 40082 - protein, 7 aa, synthetic construct
YFSGLID

SEQ ID NO: 40083 - protein, 7 aa, synthetic construct
VMEARQW

SEQ ID NO: 40084 - protein, 7 aa, synthetic construct
YWGGIPD

SEQ ID NO: 40085 - protein, 7 aa, synthetic construct
LARTGND

SEQ ID NO: 40086 - protein, 7 aa, synthetic construct
GLASSTW

SEQ ID NO: 40087 - protein, 7 aa, synthetic construct
CKSSCKP

SEQ ID NO: 40088 - protein, 7 aa, synthetic construct
CKLSSKA

SEQ ID NO: 40089 - protein, 7 aa, synthetic construct
LTRLNPD

SEQ ID NO: 40090 - protein, 7 aa, synthetic construct
WTPICKA

SEQ ID NO: 40091 - protein, 7 aa, synthetic construct
KTEFCAA

SEQ ID NO: 40092 - protein, 7 aa, synthetic construct
YYSGVIS

SEQ ID NO: 40093 - protein, 7 aa, synthetic construct
KDDFLTW

SEQ ID NO: 40094 - protein, 7 aa, synthetic construct
CKAVAPP

SEQ ID NO: 40095 - protein, 7 aa, synthetic construct
FWSGVSE

SEQ ID NO: 40096 - protein, 7 aa, synthetic construct
FNSTNGR

SEQ ID NO: 40097 - protein, 7 aa, synthetic construct
CKPQMGT

SEQ ID NO: 40098 - protein, 7 aa, synthetic construct
YWTGTLE

SEQ ID NO: 40099 - protein, 7 aa, synthetic construct
YWTGQVA

SEQ ID NO: 40100 - protein, 7 aa, synthetic construct
AMESSNW

SEQ ID NO: 40101 - protein, 7 aa, synthetic construct
WQPMCKA

SEQ ID NO: 40102 - protein, 7 aa, synthetic construct
VGSDRGW

SEQ ID NO: 40103 - protein, 7 aa, synthetic construct
YFSAVKE

SEQ ID NO: 40104 - protein, 7 aa, synthetic construct
CPKTKLE

SEQ ID NO: 40105 - protein, 7 aa, synthetic construct
KNDYLIY

SEQ ID NO: 40106 - protein, 7 aa, synthetic construct
RRDGTPA

SEQ ID NO: 40107 - protein, 7 aa, synthetic construct
CKPSPLT

SEQ ID NO: 40108 - protein, 7 aa, synthetic construct
FSKICKE

SEQ ID NO: 40109 - protein, 7 aa, synthetic construct
CKPQMPS

SEQ ID NO: 40110 - protein, 7 aa, synthetic construct
YFSGTIR

SEQ ID NO: 40111 - protein, 7 aa, synthetic construct
CNKPMAA

SEQ ID NO: 40112 - protein, 7 aa, synthetic construct
WLKEKMC

SEQ ID NO: 40113 - protein, 7 aa, synthetic construct
GCGTMCG

SEQ ID NO: 40114 - protein, 7 aa, synthetic construct
CRSGPTP

SEQ ID NO: 40115 - protein, 7 aa, synthetic construct
CSRNSDN

SEQ ID NO: 40116 - protein, 7 aa, synthetic construct
IDKLCKP

SEQ ID NO: 40117 - protein, 7 aa, synthetic construct
CRAQTLD

SEQ ID NO: 40118 - protein, 7 aa, synthetic construct
CKPGQQS

SEQ ID NO: 40119 - protein, 7 aa, synthetic construct
ILSSQAW

SEQ ID NO: 40120 - protein, 7 aa, synthetic construct
YSCNSDN

SEQ ID NO: 40121 - protein, 7 aa, synthetic construct
GKSGCCS

SEQ ID NO: 40122 - protein, 7 aa, synthetic construct
DQEIKRR

SEQ ID NO: 40123 - protein, 7 aa, synthetic construct
VSTHDCA

SEQ ID NO: 40124 - protein, 7 aa, synthetic construct
CAKSARE

SEQ ID NO: 40125 - protein, 7 aa, synthetic construct
YLKSNPY

SEQ ID NO: 40126 - protein, 7 aa, synthetic construct
MTGTSCM

SEQ ID NO: 40127 - protein, 7 aa, synthetic construct
CKPQHGG

SEQ ID NO: 40128 - protein, 7 aa, synthetic construct
YERGCKE

SEQ ID NO: 40129 - protein, 7 aa, synthetic construct
GGEYVSY

SEQ ID NO: 40130 - protein, 7 aa, synthetic construct
KDEWRPF

SEQ ID NO: 40131 - protein, 7 aa, synthetic construct
WFTGRID

SEQ ID NO: 40132 - protein, 7 aa, synthetic construct
KDDFVVW

SEQ ID NO: 40133 - protein, 7 aa, synthetic construct
GCKPLCV

SEQ ID NO: 40134 - protein, 7 aa, synthetic construct
YSRLSDY

SEQ ID NO: 40135 - protein, 7 aa, synthetic construct
YYTGVQA

SEQ ID NO: 40136 - protein, 7 aa, synthetic construct
CNKDMTA

SEQ ID NO: 40137 - protein, 7 aa, synthetic construct
CMKPRLE

SEQ ID NO: 40138 - protein, 7 aa, synthetic construct
GCRHGDV

SEQ ID NO: 40139 - protein, 7 aa, synthetic construct
WWSGTAA

SEQ ID NO: 40140 - protein, 7 aa, synthetic construct
WTPACKA

SEQ ID NO: 40141 - protein, 7 aa, synthetic construct
RTYEVYP

SEQ ID NO: 40142 - protein, 7 aa, synthetic construct
RDQYSTY

SEQ ID NO: 40143 - protein, 7 aa, synthetic construct
GDDFVRW

SEQ ID NO: 40144 - protein, 7 aa, synthetic construct
YYSGRID

SEQ ID NO: 40145 - protein, 7 aa, synthetic construct
CAPFLHE

SEQ ID NO: 40146 - protein, 7 aa, synthetic construct
EPQSRHW

SEQ ID NO: 40147 - protein, 7 aa, synthetic construct
GCGTKAG

SEQ ID NO: 40148 - protein, 7 aa, synthetic construct
RMESADW

SEQ ID NO: 40149 - protein, 7 aa, synthetic construct
FYEGKPC

SEQ ID NO: 40150 - protein, 7 aa, synthetic construct
CNKPMTV

SEQ ID NO: 40151 - protein, 7 aa, synthetic construct
REQEVRW

SEQ ID NO: 40152 - protein, 7 aa, synthetic construct
CKGSKEQ

SEQ ID NO: 40153 - protein, 7 aa, synthetic construct
YFSGTVY

SEQ ID NO: 40154 - protein, 7 aa, synthetic construct
CRGDNGV

SEQ ID NO: 40155 - protein, 7 aa, synthetic construct
RTPTCPP

SEQ ID NO: 40156 - protein, 7 aa, synthetic construct
RDSYSTY

SEQ ID NO: 40157 - protein, 7 aa, synthetic construct
MTGTSCW

SEQ ID NO: 40158 - protein, 7 aa, synthetic construct
SANTGRC

SEQ ID NO: 40159 - protein, 7 aa, synthetic construct
GCVVKPE

SEQ ID NO: 40160 - protein, 7 aa, synthetic construct
LKDGTNA

SEQ ID NO: 40161 - protein, 7 aa, synthetic construct
YYTGHLD

SEQ ID NO: 40162 - protein, 7 aa, synthetic construct
YFSGQSA

SEQ ID NO: 40163 - protein, 7 aa, synthetic construct
YFAGVMN

SEQ ID NO: 40164 - protein, 7 aa, synthetic construct
CREGTRA

SEQ ID NO: 40165 - protein, 7 aa, synthetic construct
REPGCKE

SEQ ID NO: 40166 - protein, 7 aa, synthetic construct
GSIGVAW

SEQ ID NO: 40167 - protein, 7 aa, synthetic construct
REDHTYW

SEQ ID NO: 40168 - protein, 7 aa, synthetic construct
YFPGCKE

SEQ ID NO: 40169 - protein, 7 aa, synthetic construct
NALEGKD

SEQ ID NO: 40170 - protein, 7 aa, synthetic construct
YFSGRHD

SEQ ID NO: 40171 - protein, 7 aa, synthetic construct
GCRHGGI

SEQ ID NO: 40172 - protein, 7 aa, synthetic construct
RDEFVMF

SEQ ID NO: 40173 - protein, 7 aa, synthetic construct
KWDSATW

SEQ ID NO: 40174 - protein, 7 aa, synthetic construct
KLESVVW

SEQ ID NO: 40175 - protein, 7 aa, synthetic construct
CKPPMPP

SEQ ID NO: 40176 - protein, 7 aa, synthetic construct
CRPGTPG

SEQ ID NO: 40177 - protein, 7 aa, synthetic construct
CTSDTGH

SEQ ID NO: 40178 - protein, 7 aa, synthetic construct
YVRSNAN

SEQ ID NO: 40179 - protein, 7 aa, synthetic construct
GADGVRW

SEQ ID NO: 40180 - protein, 7 aa, synthetic construct
YFKGKCE

SEQ ID NO: 40181 - protein, 7 aa, synthetic construct
DRGGCPR

SEQ ID NO: 40182 - protein, 7 aa, synthetic construct
IPSSSLW

SEQ ID NO: 40183 - protein, 7 aa, synthetic construct
YWSGMPE

SEQ ID NO: 40184 - protein, 7 aa, synthetic construct
CGGGKTP

SEQ ID NO: 40185 - protein, 7 aa, synthetic construct
FIKHDTK

SEQ ID NO: 40186 - protein, 7 aa, synthetic construct
CNKPYTA

SEQ ID NO: 40187 - protein, 7 aa, synthetic construct
WMKGACA

SEQ ID NO: 40188 - protein, 7 aa, synthetic construct
YWSGMNA

SEQ ID NO: 40189 - protein, 7 aa, synthetic construct
YVRSQQS

SEQ ID NO: 40190 - protein, 7 aa, synthetic construct
RDAFTVY

SEQ ID NO: 40191 - protein, 7 aa, synthetic construct
YEMGCKE

SEQ ID NO: 40192 - protein, 7 aa, synthetic construct
SMQDRGW

SEQ ID NO: 40193 - protein, 7 aa, synthetic construct
KNDSATC

SEQ ID NO: 40194 - protein, 7 aa, synthetic construct
CAKVGVP

SEQ ID NO: 40195 - protein, 7 aa, synthetic construct
MTGTSCI

SEQ ID NO: 40196 - protein, 7 aa, synthetic construct
RSPDAYP

SEQ ID NO: 40197 - protein, 7 aa, synthetic construct
CMKKSET

SEQ ID NO: 40198 - protein, 7 aa, synthetic construct
IPHRSCA

SEQ ID NO: 40199 - protein, 7 aa, synthetic construct
CMPGAVE

SEQ ID NO: 40200 - protein, 7 aa, synthetic construct
CRSTPGM

SEQ ID NO: 40201 - protein, 7 aa, synthetic construct
YLPGCKE

SEQ ID NO: 40202 - protein, 7 aa, synthetic construct
KDGSCKA

SEQ ID NO: 40203 - protein, 7 aa, synthetic construct
CREGTPP

SEQ ID NO: 40204 - protein, 7 aa, synthetic construct
YWGGVAA

SEQ ID NO: 40205 - protein, 7 aa, synthetic construct
YLKNDPT

SEQ ID NO: 40206 - protein, 7 aa, synthetic construct
YSRIHPN

SEQ ID NO: 40207 - protein, 7 aa, synthetic construct
CKELKMD

SEQ ID NO: 40208 - protein, 7 aa, synthetic construct
WWSQVRE

SEQ ID NO: 40209 - protein, 7 aa, synthetic construct
YGRGCCG

SEQ ID NO: 40210 - protein, 7 aa, synthetic construct
YFSGEIA

SEQ ID NO: 40211 - protein, 7 aa, synthetic construct
TWDGQNA

SEQ ID NO: 40212 - protein, 7 aa, synthetic construct
CKGSGEQ

SEQ ID NO: 40213 - protein, 7 aa, synthetic construct
CKPRCCE

SEQ ID NO: 40214 - protein, 7 aa, synthetic construct
CKPEAFP

SEQ ID NO: 40215 - protein, 7 aa, synthetic construct
FFSGRID

SEQ ID NO: 40216 - protein, 7 aa, synthetic construct
YYTGRHD

SEQ ID NO: 40217 - protein, 7 aa, synthetic construct
YFTGNRD

SEQ ID NO: 40218 - protein, 7 aa, synthetic construct
CNKPMTM

SEQ ID NO: 40219 - protein, 7 aa, synthetic construct
YFHGVQD

SEQ ID NO: 40220 - protein, 7 aa, synthetic construct
YSRIGPF

SEQ ID NO: 40221 - protein, 7 aa, synthetic construct
CKSDTRW

SEQ ID NO: 40222 - protein, 7 aa, synthetic construct
REEIVRW

SEQ ID NO: 40223 - protein, 7 aa, synthetic construct
WWSEIRE

SEQ ID NO: 40224 - protein, 7 aa, synthetic construct
HPSKCPP

SEQ ID NO: 40225 - protein, 7 aa, synthetic construct
MQGTSCL

SEQ ID NO: 40226 - protein, 7 aa, synthetic construct
RDKTEGC

SEQ ID NO: 40227 - protein, 7 aa, synthetic construct
CKLDKDD

SEQ ID NO: 40228 - protein, 7 aa, synthetic construct
CADRKQG

SEQ ID NO: 40229 - protein, 7 aa, synthetic construct
CRPQTPS

SEQ ID NO: 40230 - protein, 7 aa, synthetic construct
KDDFVYF

SEQ ID NO: 40231 - protein, 7 aa, synthetic construct
AGYDRLW

SEQ ID NO: 40232 - protein, 7 aa, synthetic construct
HGKAQCV

SEQ ID NO: 40233 - protein, 7 aa, synthetic construct
EMGSSNW

SEQ ID NO: 40234 - protein, 7 aa, synthetic construct
YYTGQTE

SEQ ID NO: 40235 - protein, 7 aa, synthetic construct
IADGLRW

SEQ ID NO: 40236 - protein, 7 aa, synthetic construct
CREMGVG

SEQ ID NO: 40237 - protein, 7 aa, synthetic construct
YVRSGTN

SEQ ID NO: 40238 - protein, 7 aa, synthetic construct
RMDNVFP

SEQ ID NO: 40239 - protein, 7 aa, synthetic construct
CTSKTGD

SEQ ID NO: 40240 - protein, 7 aa, synthetic construct
CKPRPEA

SEQ ID NO: 40241 - protein, 7 aa, synthetic construct
GSEFTSF

SEQ ID NO: 40242 - protein, 7 aa, synthetic construct
LHRLHAD

SEQ ID NO: 40243 - protein, 7 aa, synthetic construct
CRPPMPP

SEQ ID NO: 40244 - protein, 7 aa, synthetic construct
YYTGKLS

SEQ ID NO: 40245 - protein, 7 aa, synthetic construct
WFSGIQE

SEQ ID NO: 40246 - protein, 7 aa, synthetic construct
YWSGMRE

SEQ ID NO: 40247 - protein, 7 aa, synthetic construct
REPHCCG

SEQ ID NO: 40248 - protein, 7 aa, synthetic construct
QMEDRAW

SEQ ID NO: 40249 - protein, 7 aa, synthetic construct
CHKPMTA

SEQ ID NO: 40250 - protein, 7 aa, synthetic construct
YHRIGTN

SEQ ID NO: 40251 - protein, 7 aa, synthetic construct
CVVRSAG

SEQ ID NO: 40252 - protein, 7 aa, synthetic construct
PCKPQPM

SEQ ID NO: 40253 - protein, 7 aa, synthetic construct
LHKLCED

SEQ ID NO: 40254 - protein, 7 aa, synthetic construct
FFTGMRE

SEQ ID NO: 40255 - protein, 7 aa, synthetic construct
CKDATRM

SEQ ID NO: 40256 - protein, 7 aa, synthetic construct
CGGGRQT

SEQ ID NO: 40257 - protein, 7 aa, synthetic construct
CLPTHCG

SEQ ID NO: 40258 - protein, 7 aa, synthetic construct
YFSGVNR

SEQ ID NO: 40259 - protein, 7 aa, synthetic construct
CNMPMTA

SEQ ID NO: 40260 - protein, 7 aa, synthetic construct
YHRLGEP

SEQ ID NO: 40261 - protein, 7 aa, synthetic construct
AGFDRGW

SEQ ID NO: 40262 - protein, 7 aa, synthetic construct
REYEVFP

SEQ ID NO: 40263 - protein, 7 aa, synthetic construct
CDKAPKE

SEQ ID NO: 40264 - protein, 7 aa, synthetic construct
KHDYCAP

SEQ ID NO: 40265 - protein, 7 aa, synthetic construct
CRPTCKP

SEQ ID NO: 40266 - protein, 7 aa, synthetic construct
CTIKTGH

SEQ ID NO: 40267 - protein, 7 aa, synthetic construct
CKPEATW

SEQ ID NO: 40268 - protein, 7 aa, synthetic construct
YSRMSDN

SEQ ID NO: 40269 - protein, 7 aa, synthetic construct
CERVGPT

SEQ ID NO: 40270 - protein, 7 aa, synthetic construct
CKSRSLD

SEQ ID NO: 40271 - protein, 7 aa, synthetic construct
IPERCCK

SEQ ID NO: 40272 - protein, 7 aa, synthetic construct
KYARSSE

SEQ ID NO: 40273 - protein, 7 aa, synthetic construct
YWSNVKD

SEQ ID NO: 40274 - protein, 7 aa, synthetic construct
YFSGLRA

SEQ ID NO: 40275 - protein, 7 aa, synthetic construct
WFSGITE

SEQ ID NO: 40276 - protein, 7 aa, synthetic construct
CGKIPPP

SEQ ID NO: 40277 - protein, 7 aa, synthetic construct
YFHGLTA

SEQ ID NO: 40278 - protein, 7 aa, synthetic construct
YSRKSDN

SEQ ID NO: 40279 - protein, 7 aa, synthetic construct
GGPSCKP

SEQ ID NO: 40280 - protein, 7 aa, synthetic construct
CNQNNKP

SEQ ID NO: 40281 - protein, 7 aa, synthetic construct
CKVKMPP

SEQ ID NO: 40282 - protein, 7 aa, synthetic construct
WVRSDVR

SEQ ID NO: 40283 - protein, 7 aa, synthetic construct
YFHGRHD

SEQ ID NO: 40284 - protein, 7 aa, synthetic construct
YWSGRAD

SEQ ID NO: 40285 - protein, 7 aa, synthetic construct
SMQDRNW

SEQ ID NO: 40286 - protein, 7 aa, synthetic construct
CKLGNVS

SEQ ID NO: 40287 - protein, 7 aa, synthetic construct
YWSGRND

SEQ ID NO: 40288 - protein, 7 aa, synthetic construct
YYTGQID

SEQ ID NO: 40289 - protein, 7 aa, synthetic construct
HCRPCSE

SEQ ID NO: 40290 - protein, 7 aa, synthetic construct
CKPNSGG

SEQ ID NO: 40291 - protein, 7 aa, synthetic construct
CKGGGAG

SEQ ID NO: 40292 - protein, 7 aa, synthetic construct
FFTGRMD

SEQ ID NO: 40293 - protein, 7 aa, synthetic construct
DLSSLDW

SEQ ID NO: 40294 - protein, 7 aa, synthetic construct
GGGTKCG

SEQ ID NO: 40295 - protein, 7 aa, synthetic construct
FARTGWD

SEQ ID NO: 40296 - protein, 7 aa, synthetic construct
YYTGRTD

SEQ ID NO: 40297 - protein, 7 aa, synthetic construct
YVRSDPM

SEQ ID NO: 40298 - protein, 7 aa, synthetic construct
CKPPMDG

SEQ ID NO: 40299 - protein, 7 aa, synthetic construct
SLADRGW

SEQ ID NO: 40300 - protein, 7 aa, synthetic construct
YVRSGGG

SEQ ID NO: 40301 - protein, 7 aa, synthetic construct
CKPSSPY

SEQ ID NO: 40302 - protein, 7 aa, synthetic construct
CRSRMAE

SEQ ID NO: 40303 - protein, 7 aa, synthetic construct
YFAGKMA

SEQ ID NO: 40304 - protein, 7 aa, synthetic construct
APPEVRW

SEQ ID NO: 40305 - protein, 7 aa, synthetic construct
GFETVRW

SEQ ID NO: 40306 - protein, 7 aa, synthetic construct
YVRSQPQ

SEQ ID NO: 40307 - protein, 7 aa, synthetic construct
LDDWTGF

SEQ ID NO: 40308 - protein, 7 aa, synthetic construct
KTPMCKA

SEQ ID NO: 40309 - protein, 7 aa, synthetic construct
WVKSQQC

SEQ ID NO: 40310 - protein, 7 aa, synthetic construct
CKPPPLA

SEQ ID NO: 40311 - protein, 7 aa, synthetic construct
FFSGTRA

SEQ ID NO: 40312 - protein, 7 aa, synthetic construct
CKPVQPE

SEQ ID NO: 40313 - protein, 7 aa, synthetic construct
PCRPCSE

SEQ ID NO: 40314 - protein, 7 aa, synthetic construct
YFQGRHE

SEQ ID NO: 40315 - protein, 7 aa, synthetic construct
GIDVVRW

SEQ ID NO: 40316 - protein, 7 aa, synthetic construct
YVRSGPP

SEQ ID NO: 40317 - protein, 7 aa, synthetic construct
NLNGKAC

SEQ ID NO: 40318 - protein, 7 aa, synthetic construct
YWSAINE

SEQ ID NO: 40319 - protein, 7 aa, synthetic construct
GSNGVRW

SEQ ID NO: 40320 - protein, 7 aa, synthetic construct
TRWGDPA

SEQ ID NO: 40321 - protein, 7 aa, synthetic construct
CRSEVVK

SEQ ID NO: 40322 - protein, 7 aa, synthetic construct
CKPSPLS

SEQ ID NO: 40323 - protein, 7 aa, synthetic construct
YWHGKID

SEQ ID NO: 40324 - protein, 7 aa, synthetic construct
MWDGTYA

SEQ ID NO: 40325 - protein, 7 aa, synthetic construct
YFSGQQS

SEQ ID NO: 40326 - protein, 7 aa, synthetic construct
YSRLDSY

SEQ ID NO: 40327 - protein, 7 aa, synthetic construct
YWSGTAA

SEQ ID NO: 40328 - protein, 7 aa, synthetic construct
GMEHVRW

SEQ ID NO: 40329 - protein, 7 aa, synthetic construct
YFQGKIS

SEQ ID NO: 40330 - protein, 7 aa, synthetic construct
CQKEKME

SEQ ID NO: 40331 - protein, 7 aa, synthetic construct
YSRLSQD

SEQ ID NO: 40332 - protein, 7 aa, synthetic construct
KDDYMYY

SEQ ID NO: 40333 - protein, 7 aa, synthetic construct
YYSGVTA

SEQ ID NO: 40334 - protein, 7 aa, synthetic construct
RDEFNIY

SEQ ID NO: 40335 - protein, 7 aa, synthetic construct
CNYPMTA

SEQ ID NO: 40336 - protein, 7 aa, synthetic construct
WTDGTRY

SEQ ID NO: 40337 - protein, 7 aa, synthetic construct
RELTCPR

SEQ ID NO: 40338 - protein, 7 aa, synthetic construct
CKPRSAE

SEQ ID NO: 40339 - protein, 7 aa, synthetic construct
CKPRSTE

SEQ ID NO: 40340 - protein, 7 aa, synthetic construct
FFSGIQE

SEQ ID NO: 40341 - protein, 7 aa, synthetic construct
KCGKQEG

SEQ ID NO: 40342 - protein, 7 aa, synthetic construct
FFSGQRD

SEQ ID NO: 40343 - protein, 7 aa, synthetic construct
DMRSPMW

SEQ ID NO: 40344 - protein, 7 aa, synthetic construct
NMGDRKW

SEQ ID NO: 40345 - protein, 7 aa, synthetic construct
CANDYRE

SEQ ID NO: 40346 - protein, 7 aa, synthetic construct
CGEKCCP

SEQ ID NO: 40347 - protein, 7 aa, synthetic construct
CREGTSA

SEQ ID NO: 40348 - protein, 7 aa, synthetic construct
CSTNWKS

SEQ ID NO: 40349 - protein, 7 aa, synthetic construct
GGGVVRY

SEQ ID NO: 40350 - protein, 7 aa, synthetic construct
MPCSKTP

SEQ ID NO: 40351 - protein, 7 aa, synthetic construct
FKECSTG

SEQ ID NO: 40352 - protein, 7 aa, synthetic construct
CKPGTWE

SEQ ID NO: 40353 - protein, 7 aa, synthetic construct
IPKGPCA

SEQ ID NO: 40354 - protein, 7 aa, synthetic construct
CKPPVDA

SEQ ID NO: 40355 - protein, 7 aa, synthetic construct
CIKPMTA

SEQ ID NO: 40356 - protein, 7 aa, synthetic construct
VSTHCVA

SEQ ID NO: 40357 - protein, 7 aa, synthetic construct
YHRQNPL

SEQ ID NO: 40358 - protein, 7 aa, synthetic construct
PVDTCRP

SEQ ID NO: 40359 - protein, 7 aa, synthetic construct
CDGSRKA

SEQ ID NO: 40360 - protein, 7 aa, synthetic construct
LHRLCPD

SEQ ID NO: 40361 - protein, 7 aa, synthetic construct
CIMKKLE

SEQ ID NO: 40362 - protein, 7 aa, synthetic construct
GSGTSAW

SEQ ID NO: 40363 - protein, 7 aa, synthetic construct
LKGSCEQ

SEQ ID NO: 40364 - protein, 7 aa, synthetic construct
CTVKTGH

SEQ ID NO: 40365 - protein, 7 aa, synthetic construct
CKLNGPD

SEQ ID NO: 40366 - protein, 7 aa, synthetic construct
CKAVSRD

SEQ ID NO: 40367 - protein, 7 aa, synthetic construct
CKPTMVQ

SEQ ID NO: 40368 - protein, 7 aa, synthetic construct
YFSGTIV

SEQ ID NO: 40369 - protein, 7 aa, synthetic construct
YFSGKTV

SEQ ID NO: 40370 - protein, 7 aa, synthetic construct
YFSGVRG

SEQ ID NO: 40371 - protein, 7 aa, synthetic construct
CNKPMTE

SEQ ID NO: 40372 - protein, 7 aa, synthetic construct
YWQGVVD

SEQ ID NO: 40373 - protein, 7 aa, synthetic construct
CYKPMTA

SEQ ID NO: 40374 - protein, 7 aa, synthetic construct
TQICPDR

SEQ ID NO: 40375 - protein, 7 aa, synthetic construct
YFKTQCD

SEQ ID NO: 40376 - protein, 7 aa, synthetic construct
CNQPMTA

SEQ ID NO: 40377 - protein, 7 aa, synthetic construct
CNKPMTT

SEQ ID NO: 40378 - protein, 7 aa, synthetic construct
YFTNVKE

SEQ ID NO: 40379 - protein, 7 aa, synthetic construct
DMQDRSW

SEQ ID NO: 40380 - protein, 7 aa, synthetic construct
PLKSSLW

SEQ ID NO: 40381 - protein, 7 aa, synthetic construct
AGMDRGW

SEQ ID NO: 40382 - protein, 7 aa, synthetic construct
YADSKTC

SEQ ID NO: 40383 - protein, 7 aa, synthetic construct
CGKRDAD

SEQ ID NO: 40384 - protein, 7 aa, synthetic construct
CPKNQRE

SEQ ID NO: 40385 - protein, 7 aa, synthetic construct
RDEFMSF

SEQ ID NO: 40386 - protein, 7 aa, synthetic construct
MTGTDCL

SEQ ID NO: 40387 - protein, 7 aa, synthetic construct
YFQGQHE

SEQ ID NO: 40388 - protein, 7 aa, synthetic construct
GILTRGS

SEQ ID NO: 40389 - protein, 7 aa, synthetic construct
CKMDGTG

SEQ ID NO: 40390 - protein, 7 aa, synthetic construct
EEPGCKE

SEQ ID NO: 40391 - protein, 7 aa, synthetic construct
YFTGAMD

SEQ ID NO: 40392 - protein, 7 aa, synthetic construct
RALDGFD

SEQ ID NO: 40393 - protein, 7 aa, synthetic construct
GREHVKW

SEQ ID NO: 40394 - protein, 7 aa, synthetic construct
YYTGHPN

SEQ ID NO: 40395 - protein, 7 aa, synthetic construct
RENEVRW

SEQ ID NO: 40396 - protein, 7 aa, synthetic construct
YWTGQVE

SEQ ID NO: 40397 - protein, 7 aa, synthetic construct
MSEFKSW

SEQ ID NO: 40398 - protein, 7 aa, synthetic construct
PPVIQCS

SEQ ID NO: 40399 - protein, 7 aa, synthetic construct
MPDGTGP

SEQ ID NO: 40400 - protein, 7 aa, synthetic construct
CGLNPCG

SEQ ID NO: 40401 - protein, 7 aa, synthetic construct
CKPMAPD

SEQ ID NO: 40402 - protein, 7 aa, synthetic construct
CTSKTEH

SEQ ID NO: 40403 - protein, 7 aa, synthetic construct
SAPTCKG

SEQ ID NO: 40404 - protein, 7 aa, synthetic construct
YDPGCKE

SEQ ID NO: 40405 - protein, 7 aa, synthetic construct
CKPPFVA

SEQ ID NO: 40406 - protein, 7 aa, synthetic construct
GSEFKSW

SEQ ID NO: 40407 - protein, 7 aa, synthetic construct
CKPGMGS

SEQ ID NO: 40408 - protein, 7 aa, synthetic construct
YFSGTVT

SEQ ID NO: 40409 - protein, 7 aa, synthetic construct
KEEHVRW

SEQ ID NO: 40410 - protein, 7 aa, synthetic construct
CKPPPTP

SEQ ID NO: 40411 - protein, 7 aa, synthetic construct
YYSGQRE

SEQ ID NO: 40412 - protein, 7 aa, synthetic construct
GDNNKVC

SEQ ID NO: 40413 - protein, 7 aa, synthetic construct
VNDAGKC

SEQ ID NO: 40414 - protein, 7 aa, synthetic construct
FWTGKVE

SEQ ID NO: 40415 - protein, 7 aa, synthetic construct
YYSGVQA

SEQ ID NO: 40416 - protein, 7 aa, synthetic construct
KNDYATW

SEQ ID NO: 40417 - protein, 7 aa, synthetic construct
CKPVKGE

SEQ ID NO: 40418 - protein, 7 aa, synthetic construct
CTSKTYH

SEQ ID NO: 40419 - protein, 7 aa, synthetic construct
LAKTAWN

SEQ ID NO: 40420 - protein, 7 aa, synthetic construct
YYSGVSA

SEQ ID NO: 40421 - protein, 7 aa, synthetic construct
IPGCMSF

SEQ ID NO: 40422 - protein, 7 aa, synthetic construct
CNKPLTA

SEQ ID NO: 40423 - protein, 7 aa, synthetic construct
KDGLSRW

SEQ ID NO: 40424 - protein, 7 aa, synthetic construct
CKPGSPL

SEQ ID NO: 40425 - protein, 7 aa, synthetic construct
LEKPCLT

SEQ ID NO: 40426 - protein, 7 aa, synthetic construct
CKPGQPM

SEQ ID NO: 40427 - protein, 7 aa, synthetic construct
FWSGVPA

SEQ ID NO: 40428 - protein, 7 aa, synthetic construct
GGSTSSW

SEQ ID NO: 40429 - protein, 7 aa, synthetic construct
YFTGVQT

SEQ ID NO: 40430 - protein, 7 aa, synthetic construct
YYSGKHE

SEQ ID NO: 40431 - protein, 7 aa, synthetic construct
RLYDAIA

SEQ ID NO: 40432 - protein, 7 aa, synthetic construct
YFTGTAK

SEQ ID NO: 40433 - protein, 7 aa, synthetic construct
WWSSIKE

SEQ ID NO: 40434 - protein, 7 aa, synthetic construct
LAKTGCM

SEQ ID NO: 40435 - protein, 7 aa, synthetic construct
YWQGKVA

SEQ ID NO: 40436 - protein, 7 aa, synthetic construct
DTNHKWS

SEQ ID NO: 40437 - protein, 7 aa, synthetic construct
SDGQSKW

SEQ ID NO: 40438 - protein, 7 aa, synthetic construct
YSRISSN

SEQ ID NO: 40439 - protein, 7 aa, synthetic construct
VSTHCFA

SEQ ID NO: 40440 - protein, 7 aa, synthetic construct
YYTGQVL

SEQ ID NO: 40441 - protein, 7 aa, synthetic construct
YYHGIAA

SEQ ID NO: 40442 - protein, 7 aa, synthetic construct
YFSGMQA

SEQ ID NO: 40443 - protein, 7 aa, synthetic construct
KQGEGSC

SEQ ID NO: 40444 - protein, 7 aa, synthetic construct
FWSGKLD

SEQ ID NO: 40445 - protein, 7 aa, synthetic construct
CAPALHE

SEQ ID NO: 40446 - protein, 7 aa, synthetic construct
RDEYVMY

SEQ ID NO: 40447 - protein, 7 aa, synthetic construct
YWQGTVA

SEQ ID NO: 40448 - protein, 7 aa, synthetic construct
CAPAYRE

SEQ ID NO: 40449 - protein, 7 aa, synthetic construct
CGKKQLD

SEQ ID NO: 40450 - protein, 7 aa, synthetic construct
YYSGYKD

SEQ ID NO: 40451 - protein, 7 aa, synthetic construct
FWSGMKD

SEQ ID NO: 40452 - protein, 7 aa, synthetic construct
YFSGLRD

SEQ ID NO: 40453 - protein, 7 aa, synthetic construct
NYARSAE

SEQ ID NO: 40454 - protein, 7 aa, synthetic construct
GAGTSKW

SEQ ID NO: 40455 - protein, 7 aa, synthetic construct
GSGTSRW

SEQ ID NO: 40456 - protein, 7 aa, synthetic construct
CNEPMTA

SEQ ID NO: 40457 - protein, 7 aa, synthetic construct
MDGSSKW

SEQ ID NO: 40458 - protein, 7 aa, synthetic construct
YFTGEIL

SEQ ID NO: 40459 - protein, 7 aa, synthetic construct
YWKPEVN

SEQ ID NO: 40460 - protein, 7 aa, synthetic construct
RVIDAFP

SEQ ID NO: 40461 - protein, 7 aa, synthetic construct
YFSGMPD

SEQ ID NO: 40462 - protein, 7 aa, synthetic construct
PVESRTW

SEQ ID NO: 40463 - protein, 7 aa, synthetic construct
YSRVSVN

SEQ ID NO: 40464 - protein, 7 aa, synthetic construct
TYTGDPA

SEQ ID NO: 40465 - protein, 7 aa, synthetic construct
YYTGVTK

SEQ ID NO: 40466 - protein, 7 aa, synthetic construct
CKGVPCC

SEQ ID NO: 40467 - protein, 7 aa, synthetic construct
CDRSCKA

SEQ ID NO: 40468 - protein, 7 aa, synthetic construct
DMRDHRW

SEQ ID NO: 40469 - protein, 7 aa, synthetic construct
YWAGKME

SEQ ID NO: 40470 - protein, 7 aa, synthetic construct
REPTVRW

SEQ ID NO: 40471 - protein, 7 aa, synthetic construct
DMRSTKW

SEQ ID NO: 40472 - protein, 7 aa, synthetic construct
YHAKSTN

SEQ ID NO: 40473 - protein, 7 aa, synthetic construct
PLRLDPR

SEQ ID NO: 40474 - protein, 7 aa, synthetic construct
CRPDYRE

SEQ ID NO: 40475 - protein, 7 aa, synthetic construct
IMGDRIW

SEQ ID NO: 40476 - protein, 7 aa, synthetic construct
FWSGTVA

SEQ ID NO: 40477 - protein, 7 aa, synthetic construct
FWSGKVD

SEQ ID NO: 40478 - protein, 7 aa, synthetic construct
TKNSTTC

SEQ ID NO: 40479 - protein, 7 aa, synthetic construct
CKPGMGA

SEQ ID NO: 40480 - protein, 7 aa, synthetic construct
CTSKTGS

SEQ ID NO: 40481 - protein, 7 aa, synthetic construct
CKPSPMP

SEQ ID NO: 40482 - protein, 7 aa, synthetic construct
KATQQEC

SEQ ID NO: 40483 - protein, 7 aa, synthetic construct
YWTGTAS

SEQ ID NO: 40484 - protein, 7 aa, synthetic construct
YWSGTVK

SEQ ID NO: 40485 - protein, 7 aa, synthetic construct
CRDKMPG

SEQ ID NO: 40486 - protein, 7 aa, synthetic construct
FFTGVVS

SEQ ID NO: 40487 - protein, 7 aa, synthetic construct
LLASQTW

SEQ ID NO: 40488 - protein, 7 aa, synthetic construct
YWSGQID

SEQ ID NO: 40489 - protein, 7 aa, synthetic construct
LSRASFD

SEQ ID NO: 40490 - protein, 7 aa, synthetic construct
ALSDRSW

SEQ ID NO: 40491 - protein, 7 aa, synthetic construct
CVDKRHP

SEQ ID NO: 40492 - protein, 7 aa, synthetic construct
RDAVSRW

SEQ ID NO: 40493 - protein, 7 aa, synthetic construct
SMPDRSW

SEQ ID NO: 40494 - protein, 7 aa, synthetic construct
CATKCKP

SEQ ID NO: 40495 - protein, 7 aa, synthetic construct
GNKHCMD

SEQ ID NO: 40496 - protein, 7 aa, synthetic construct
WPNGVDG

SEQ ID NO: 40497 - protein, 7 aa, synthetic construct
CKPVHPE

SEQ ID NO: 40498 - protein, 7 aa, synthetic construct
LRNGTPA

SEQ ID NO: 40499 - protein, 7 aa, synthetic construct
YFTAKIE

SEQ ID NO: 40500 - protein, 7 aa, synthetic construct
GPPRCPA

SEQ ID NO: 40501 - protein, 7 aa, synthetic construct
RLPTTPC

SEQ ID NO: 40502 - protein, 7 aa, synthetic construct
CMSDSKA

SEQ ID NO: 40503 - protein, 7 aa, synthetic construct
YHRQNPM

SEQ ID NO: 40504 - protein, 7 aa, synthetic construct
CKPMTHE

SEQ ID NO: 40505 - protein, 7 aa, synthetic construct
CAPYLQE

SEQ ID NO: 40506 - protein, 7 aa, synthetic construct
CTSKTGY

SEQ ID NO: 40507 - protein, 7 aa, synthetic construct
CMPKKEA

SEQ ID NO: 40508 - protein, 7 aa, synthetic construct
CSSKTGH

SEQ ID NO: 40509 - protein, 7 aa, synthetic construct
YFEGQRE

SEQ ID NO: 40510 - protein, 7 aa, synthetic construct
CREGRSS

SEQ ID NO: 40511 - protein, 7 aa, synthetic construct
YFAGVTA

SEQ ID NO: 40512 - protein, 7 aa, synthetic construct
CTSKAGH

SEQ ID NO: 40513 - protein, 7 aa, synthetic construct
CPKPMTA

SEQ ID NO: 40514 - protein, 7 aa, synthetic construct
MTGTSCV

SEQ ID NO: 40515 - protein, 7 aa, synthetic construct
VAKCGAG

SEQ ID NO: 40516 - protein, 7 aa, synthetic construct
RDERSCG

SEQ ID NO: 40517 - protein, 7 aa, synthetic construct
LARSCPD

SEQ ID NO: 40518 - protein, 7 aa, synthetic construct
EDKCRQF

SEQ ID NO: 40519 - protein, 7 aa, synthetic construct
CAPFYRE

SEQ ID NO: 40520 - protein, 7 aa, synthetic construct
RSEFATF

SEQ ID NO: 40521 - protein, 7 aa, synthetic construct
DPGDRKW

SEQ ID NO: 40522 - protein, 7 aa, synthetic construct
NDGSCKA

SEQ ID NO: 40523 - protein, 7 aa, synthetic construct
RTYETYP

SEQ ID NO: 40524 - protein, 7 aa, synthetic construct
RDGNSIW

SEQ ID NO: 40525 - protein, 7 aa, synthetic construct
KSDHVRW

SEQ ID NO: 40526 - protein, 7 aa, synthetic construct
CNKPMTN

SEQ ID NO: 40527 - protein, 7 aa, synthetic construct
YSRIGPI

SEQ ID NO: 40528 - protein, 7 aa, synthetic construct
RSEFTGF

SEQ ID NO: 40529 - protein, 7 aa, synthetic construct
CTSKTQH

SEQ ID NO: 40530 - protein, 7 aa, synthetic construct
YWSGRTE

SEQ ID NO: 40531 - protein, 7 aa, synthetic construct
CKIASVP

SEQ ID NO: 40532 - protein, 7 aa, synthetic construct
YLKSQFY

SEQ ID NO: 40533 - protein, 7 aa, synthetic construct
CKPGNAA

SEQ ID NO: 40534 - protein, 7 aa, synthetic construct
IKSGEGC

SEQ ID NO: 40535 - protein, 7 aa, synthetic construct
YEPGCKS

SEQ ID NO: 40536 - protein, 7 aa, synthetic construct
CNKPMMA

SEQ ID NO: 40537 - protein, 7 aa, synthetic construct
YTKLDPH

SEQ ID NO: 40538 - protein, 7 aa, synthetic construct
YYSGRLE

SEQ ID NO: 40539 - protein, 7 aa, synthetic construct
GCGTKDG

SEQ ID NO: 40540 - protein, 7 aa, synthetic construct
GKTGPDC

SEQ ID NO: 40541 - protein, 7 aa, synthetic construct
KDGVSSW

SEQ ID NO: 40542 - protein, 7 aa, synthetic construct
YFSRQID

SEQ ID NO: 40543 - protein, 7 aa, synthetic construct
KSDECKP

SEQ ID NO: 40544 - protein, 7 aa, synthetic construct
MTKTSCL

SEQ ID NO: 40545 - protein, 7 aa, synthetic construct
CKADSRI

SEQ ID NO: 40546 - protein, 7 aa, synthetic construct
CWKPMTA

SEQ ID NO: 40547 - protein, 7 aa, synthetic construct
AMGDRGW

SEQ ID NO: 40548 - protein, 7 aa, synthetic construct
YVKTDMY

SEQ ID NO: 40549 - protein, 7 aa, synthetic construct
YKATEPC

SEQ ID NO: 40550 - protein, 7 aa, synthetic construct
GGEFRHW

SEQ ID NO: 40551 - protein, 7 aa, synthetic construct
IKGSCEQ

SEQ ID NO: 40552 - protein, 7 aa, synthetic construct
REGNSLW

SEQ ID NO: 40553 - protein, 7 aa, synthetic construct
CKVKSGE

SEQ ID NO: 40554 - protein, 7 aa, synthetic construct
WQSTNGM

SEQ ID NO: 40555 - protein, 7 aa, synthetic construct
FGEFKCE

SEQ ID NO: 40556 - protein, 7 aa, synthetic construct
MDGVCKG

SEQ ID NO: 40557 - protein, 7 aa, synthetic construct
CKAVSHD

SEQ ID NO: 40558 - protein, 7 aa, synthetic construct
CDSKTGH

SEQ ID NO: 40559 - protein, 7 aa, synthetic construct
GSPGSAW

SEQ ID NO: 40560 - protein, 7 aa, synthetic construct
CKFPTKE

SEQ ID NO: 40561 - protein, 7 aa, synthetic construct
YQKEQQC

SEQ ID NO: 40562 - protein, 7 aa, synthetic construct
GCRKGDI

SEQ ID NO: 40563 - protein, 7 aa, synthetic construct
YFHGQLA

SEQ ID NO: 40564 - protein, 7 aa, synthetic construct
LSRPCSE

SEQ ID NO: 40565 - protein, 7 aa, synthetic construct
VLQSSSW

SEQ ID NO: 40566 - protein, 7 aa, synthetic construct
CSKETMS

SEQ ID NO: 40567 - protein, 7 aa, synthetic construct
YFTAIIE

SEQ ID NO: 40568 - protein, 7 aa, synthetic construct
CLGKCQG

SEQ ID NO: 40569 - protein, 7 aa, synthetic construct
LSRAGRD

SEQ ID NO: 40570 - protein, 7 aa, synthetic construct
FPPLFAA

SEQ ID NO: 40571 - protein, 7 aa, synthetic construct
YVRSDCA

SEQ ID NO: 40572 - protein, 7 aa, synthetic construct
WTEGTKY

SEQ ID NO: 40573 - protein, 7 aa, synthetic construct
YFAGKQE

SEQ ID NO: 40574 - protein, 7 aa, synthetic construct
RLYDSYA

SEQ ID NO: 40575 - protein, 7 aa, synthetic construct
YFSGERA

SEQ ID NO: 40576 - protein, 7 aa, synthetic construct
CNKPMEA

SEQ ID NO: 40577 - protein, 7 aa, synthetic construct
KTKSECD

SEQ ID NO: 40578 - protein, 7 aa, synthetic construct
CKPGATS

SEQ ID NO: 40579 - protein, 7 aa, synthetic construct
FDGYSAY

SEQ ID NO: 40580 - protein, 7 aa, synthetic construct
YWQGMLD

SEQ ID NO: 40581 - protein, 7 aa, synthetic construct
YWEGVRE

SEQ ID NO: 40582 - protein, 7 aa, synthetic construct
YFTGHPE

SEQ ID NO: 40583 - protein, 7 aa, synthetic construct
GGAGVRW

SEQ ID NO: 40584 - protein, 7 aa, synthetic construct
GCKPDFG

SEQ ID NO: 40585 - protein, 7 aa, synthetic construct
RSYDTYP

SEQ ID NO: 40586 - protein, 7 aa, synthetic construct
RPETCPR

SEQ ID NO: 40587 - protein, 7 aa, synthetic construct
CKPKCTP

SEQ ID NO: 40588 - protein, 7 aa, synthetic construct
YWTGMPE

SEQ ID NO: 40589 - protein, 7 aa, synthetic construct
MTGTSCF

SEQ ID NO: 40590 - protein, 7 aa, synthetic construct
CKDTKTV

SEQ ID NO: 40591 - protein, 7 aa, synthetic construct
YSRNSPN

SEQ ID NO: 40592 - protein, 7 aa, synthetic construct
VRGEDRC

SEQ ID NO: 40593 - protein, 7 aa, synthetic construct
YVRHDVH

SEQ ID NO: 40594 - protein, 7 aa, synthetic construct
CKPSKLP

SEQ ID NO: 40595 - protein, 7 aa, synthetic construct
YHRIGVN

SEQ ID NO: 40596 - protein, 7 aa, synthetic construct
YFEGRIA

SEQ ID NO: 40597 - protein, 7 aa, synthetic construct
WYSGVKA

SEQ ID NO: 40598 - protein, 7 aa, synthetic construct
CRSETKL

SEQ ID NO: 40599 - protein, 7 aa, synthetic construct
RMEDHGW

SEQ ID NO: 40600 - protein, 7 aa, synthetic construct
LNRPCSE

SEQ ID NO: 40601 - protein, 7 aa, synthetic construct
YFSGTYQ

SEQ ID NO: 40602 - protein, 7 aa, synthetic construct
WMPMCKA

SEQ ID NO: 40603 - protein, 7 aa, synthetic construct
MHRLSER

SEQ ID NO: 40604 - protein, 7 aa, synthetic construct
RPETCPI

SEQ ID NO: 40605 - protein, 7 aa, synthetic construct
YFAGVIE

SEQ ID NO: 40606 - protein, 7 aa, synthetic construct
CTRLSAP

SEQ ID NO: 40607 - protein, 7 aa, synthetic construct
TDDYSKW

SEQ ID NO: 40608 - protein, 7 aa, synthetic construct
PFAKSPM

SEQ ID NO: 40609 - protein, 7 aa, synthetic construct
ILQDRGW

SEQ ID NO: 40610 - protein, 7 aa, synthetic construct
YWTGRAD

SEQ ID NO: 40611 - protein, 7 aa, synthetic construct
FFTGMRD

SEQ ID NO: 40612 - protein, 7 aa, synthetic construct
RLGQTCA

SEQ ID NO: 40613 - protein, 7 aa, synthetic construct
VPERVCG

SEQ ID NO: 40614 - protein, 7 aa, synthetic construct
FWSGTKE

SEQ ID NO: 40615 - protein, 7 aa, synthetic construct
CKLSSTP

SEQ ID NO: 40616 - protein, 7 aa, synthetic construct
CKPDKVG

SEQ ID NO: 40617 - protein, 7 aa, synthetic construct
RTPTCPG

SEQ ID NO: 40618 - protein, 7 aa, synthetic construct
KFDNTCS

SEQ ID NO: 40619 - protein, 7 aa, synthetic construct
FHRSTPN

SEQ ID NO: 40620 - protein, 7 aa, synthetic construct
YWSGKQS

SEQ ID NO: 40621 - protein, 7 aa, synthetic construct
CKVSASA

SEQ ID NO: 40622 - protein, 7 aa, synthetic construct
GGDGSTW

SEQ ID NO: 40623 - protein, 7 aa, synthetic construct
RMLDVFP

SEQ ID NO: 40624 - protein, 7 aa, synthetic construct
PWRDCTK

SEQ ID NO: 40625 - protein, 7 aa, synthetic construct
WFSGKLD

SEQ ID NO: 40626 - protein, 7 aa, synthetic construct
IKAMIKQ

SEQ ID NO: 40627 - protein, 7 aa, synthetic construct
REEEVFP

SEQ ID NO: 40628 - protein, 7 aa, synthetic construct
LARMGVN

SEQ ID NO: 40629 - protein, 7 aa, synthetic construct
REPGVAW

SEQ ID NO: 40630 - protein, 7 aa, synthetic construct
YSRVGSH

SEQ ID NO: 40631 - protein, 7 aa, synthetic construct
CREGTTA

SEQ ID NO: 40632 - protein, 7 aa, synthetic construct
YFTGVQP

SEQ ID NO: 40633 - protein, 7 aa, synthetic construct
LHRDSPN

SEQ ID NO: 40634 - protein, 7 aa, synthetic construct
FWSGKID

SEQ ID NO: 40635 - protein, 7 aa, synthetic construct
MDGQSLW

SEQ ID NO: 40636 - protein, 7 aa, synthetic construct
YYSGVKY

SEQ ID NO: 40637 - protein, 7 aa, synthetic construct
SGDSNKC

SEQ ID NO: 40638 - protein, 7 aa, synthetic construct
LHKKMPD

SEQ ID NO: 40639 - protein, 7 aa, synthetic construct
KDDWNSF

SEQ ID NO: 40640 - protein, 7 aa, synthetic construct
PLRDCVK

SEQ ID NO: 40641 - protein, 7 aa, synthetic construct
FGGRCPE

SEQ ID NO: 40642 - protein, 7 aa, synthetic construct
GSGTSNW

SEQ ID NO: 40643 - protein, 7 aa, synthetic construct
YWSGTND

SEQ ID NO: 40644 - protein, 7 aa, synthetic construct
YSRDCEN

SEQ ID NO: 40645 - protein, 7 aa, synthetic construct
CKPLCKP

SEQ ID NO: 40646 - protein, 7 aa, synthetic construct
TQRPGEC

SEQ ID NO: 40647 - protein, 7 aa, synthetic construct
RDAFTSF

SEQ ID NO: 40648 - protein, 7 aa, synthetic construct
CNKRSGE

SEQ ID NO: 40649 - protein, 7 aa, synthetic construct
CKTQRPD

SEQ ID NO: 40650 - protein, 7 aa, synthetic construct
GGSGSSW

SEQ ID NO: 40651 - protein, 7 aa, synthetic construct
CTSNTGH

SEQ ID NO: 40652 - protein, 7 aa, synthetic construct
ADGSCKA

SEQ ID NO: 40653 - protein, 7 aa, synthetic construct
CTSKTGI

SEQ ID NO: 40654 - protein, 7 aa, synthetic construct
YWSGHQA

SEQ ID NO: 40655 - protein, 7 aa, synthetic construct
YTKAQMN

SEQ ID NO: 40656 - protein, 7 aa, synthetic construct
IKNNADC

SEQ ID NO: 40657 - protein, 7 aa, synthetic construct
GDECVKA

SEQ ID NO: 40658 - protein, 7 aa, synthetic construct
CNKPDTA

SEQ ID NO: 40659 - protein, 7 aa, synthetic construct
CMPQAGR

SEQ ID NO: 40660 - protein, 7 aa, synthetic construct
YVRSDLA

SEQ ID NO: 40661 - protein, 7 aa, synthetic construct
YTRLSYD

SEQ ID NO: 40662 - protein, 7 aa, synthetic construct
CAPLYRE

SEQ ID NO: 40663 - protein, 7 aa, synthetic construct
RSEFQVF

SEQ ID NO: 40664 - protein, 7 aa, synthetic construct
CAPYIHE

SEQ ID NO: 40665 - protein, 7 aa, synthetic construct
CAPYKHE

SEQ ID NO: 40666 - protein, 7 aa, synthetic construct
CTAKTGH

SEQ ID NO: 40667 - protein, 7 aa, synthetic construct
IESSRSW

SEQ ID NO: 40668 - protein, 7 aa, synthetic construct
CKPRTME

SEQ ID NO: 40669 - protein, 7 aa, synthetic construct
CKEGSSW

SEQ ID NO: 40670 - protein, 7 aa, synthetic construct
RGDGNYW

SEQ ID NO: 40671 - protein, 7 aa, synthetic construct
ICSKLQP

SEQ ID NO: 40672 - protein, 7 aa, synthetic construct
RGGNVYP

SEQ ID NO: 40673 - protein, 7 aa, synthetic construct
CKPPSRE

SEQ ID NO: 40674 - protein, 7 aa, synthetic construct
YEPGCKN

SEQ ID NO: 40675 - protein, 7 aa, synthetic construct
YFSNVRE

SEQ ID NO: 40676 - protein, 7 aa, synthetic construct
CKPGWGE

SEQ ID NO: 40677 - protein, 7 aa, synthetic construct
YHKLNPG

SEQ ID NO: 40678 - protein, 7 aa, synthetic construct
REGTPHC

SEQ ID NO: 40679 - protein, 7 aa, synthetic construct
CKPERMG

SEQ ID NO: 40680 - protein, 7 aa, synthetic construct
CMKPMTA

SEQ ID NO: 40681 - protein, 7 aa, synthetic construct
RGEFSYP

SEQ ID NO: 40682 - protein, 7 aa, synthetic construct
YSKYHVN

SEQ ID NO: 40683 - protein, 7 aa, synthetic construct
IAAHGCG

SEQ ID NO: 40684 - protein, 7 aa, synthetic construct
FFSGRLD

SEQ ID NO: 40685 - protein, 7 aa, synthetic construct
VGGACPY

SEQ ID NO: 40686 - protein, 7 aa, synthetic construct
YWAGRVE

SEQ ID NO: 40687 - protein, 7 aa, synthetic construct
QMGSSTW

SEQ ID NO: 40688 - protein, 7 aa, synthetic construct
YDKRENC

SEQ ID NO: 40689 - protein, 7 aa, synthetic construct
YFKEKCS

SEQ ID NO: 40690 - protein, 7 aa, synthetic construct
CQLKSTD

SEQ ID NO: 40691 - protein, 7 aa, synthetic construct
YYTGKTS

SEQ ID NO: 40692 - protein, 7 aa, synthetic construct
REEVSSW

SEQ ID NO: 40693 - protein, 7 aa, synthetic construct
MEGTSCL

SEQ ID NO: 40694 - protein, 7 aa, synthetic construct
CKPPPFA

SEQ ID NO: 40695 - protein, 7 aa, synthetic construct
KSDYATY

SEQ ID NO: 40696 - protein, 7 aa, synthetic construct
LAKAGCN

SEQ ID NO: 40697 - protein, 7 aa, synthetic construct
LMQDRSW

SEQ ID NO: 40698 - protein, 7 aa, synthetic construct
YYAGKCA

SEQ ID NO: 40699 - protein, 7 aa, synthetic construct
CRPYLHE

SEQ ID NO: 40700 - protein, 7 aa, synthetic construct
GQGTSKW

SEQ ID NO: 40701 - protein, 7 aa, synthetic construct
CLKRCTP

SEQ ID NO: 40702 - protein, 7 aa, synthetic construct
QNQTSRW

SEQ ID NO: 40703 - protein, 7 aa, synthetic construct
YWSAVVD

SEQ ID NO: 40704 - protein, 7 aa, synthetic construct
CTSKTIH

SEQ ID NO: 40705 - protein, 7 aa, synthetic construct
AGPDRGW

SEQ ID NO: 40706 - protein, 7 aa, synthetic construct
FFSGQIA

SEQ ID NO: 40707 - protein, 7 aa, synthetic construct
YTRLNDG

SEQ ID NO: 40708 - protein, 7 aa, synthetic construct
LAKPCLT

SEQ ID NO: 40709 - protein, 7 aa, synthetic construct
FFSGKIS

SEQ ID NO: 40710 - protein, 7 aa, synthetic construct
LSRLAFD

SEQ ID NO: 40711 - protein, 7 aa, synthetic construct
KGDIKCA

SEQ ID NO: 40712 - protein, 7 aa, synthetic construct
CLAGKDA

SEQ ID NO: 40713 - protein, 7 aa, synthetic construct
FFTGERA

SEQ ID NO: 40714 - protein, 7 aa, synthetic construct
YYHGVRD

SEQ ID NO: 40715 - protein, 7 aa, synthetic construct
YHGKESC

SEQ ID NO: 40716 - protein, 7 aa, synthetic construct
CGAIKPP

SEQ ID NO: 40717 - protein, 7 aa, synthetic construct
KTEFTTY

SEQ ID NO: 40718 - protein, 7 aa, synthetic construct
YWEGVKD

SEQ ID NO: 40719 - protein, 7 aa, synthetic construct
FEPGCKE

SEQ ID NO: 40720 - protein, 7 aa, synthetic construct
CGESVKP

SEQ ID NO: 40721 - protein, 7 aa, synthetic construct
TNGTKCE

SEQ ID NO: 40722 - protein, 7 aa, synthetic construct
YEPICKE

SEQ ID NO: 40723 - protein, 7 aa, synthetic construct
WVKGAEC

SEQ ID NO: 40724 - protein, 7 aa, synthetic construct
CKPFVVE

SEQ ID NO: 40725 - protein, 7 aa, synthetic construct
GCGTKEG

SEQ ID NO: 40726 - protein, 7 aa, synthetic construct
TPDTVRW

SEQ ID NO: 40727 - protein, 7 aa, synthetic construct
YFSGQQR

SEQ ID NO: 40728 - protein, 7 aa, synthetic construct
YFSGYPD

SEQ ID NO: 40729 - protein, 7 aa, synthetic construct
CVPDYRE

SEQ ID NO: 40730 - protein, 7 aa, synthetic construct
CKPGQLP

SEQ ID NO: 40731 - protein, 7 aa, synthetic construct
CLKQLPP

SEQ ID NO: 40732 - protein, 7 aa, synthetic construct
GVGTKCG

SEQ ID NO: 40733 - protein, 7 aa, synthetic construct
YVRHDVR

SEQ ID NO: 40734 - protein, 7 aa, synthetic construct
CSRLPTP

SEQ ID NO: 40735 - protein, 7 aa, synthetic construct
RTYDTFA

SEQ ID NO: 40736 - protein, 7 aa, synthetic construct
IAHKCPG

SEQ ID NO: 40737 - protein, 7 aa, synthetic construct
FFTGKMD

SEQ ID NO: 40738 - protein, 7 aa, synthetic construct
QCKPCLT

SEQ ID NO: 40739 - protein, 7 aa, synthetic construct
YFSGRPS

SEQ ID NO: 40740 - protein, 7 aa, synthetic construct
RHEDVYP

SEQ ID NO: 40741 - protein, 7 aa, synthetic construct
LCRPESE

SEQ ID NO: 40742 - protein, 7 aa, synthetic construct
CKNNNSE

SEQ ID NO: 40743 - protein, 7 aa, synthetic construct
WWTGMVA

SEQ ID NO: 40744 - protein, 7 aa, synthetic construct
CDGSPKA

SEQ ID NO: 40745 - protein, 7 aa, synthetic construct
DLKSVKW

SEQ ID NO: 40746 - protein, 7 aa, synthetic construct
WTEMCKA

SEQ ID NO: 40747 - protein, 7 aa, synthetic construct
GPEGVRW

SEQ ID NO: 40748 - protein, 7 aa, synthetic construct
YTRLQFD

SEQ ID NO: 40749 - protein, 7 aa, synthetic construct
CKLDKMV

SEQ ID NO: 40750 - protein, 7 aa, synthetic construct
CNRPMTA

SEQ ID NO: 40751 - protein, 7 aa, synthetic construct
GPGTKCG

SEQ ID NO: 40752 - protein, 7 aa, synthetic construct
CARMNSN

SEQ ID NO: 40753 - protein, 7 aa, synthetic construct
CKPPKGD

SEQ ID NO: 40754 - protein, 7 aa, synthetic construct
RSDTVYF

SEQ ID NO: 40755 - protein, 7 aa, synthetic construct
LHKLNPC

SEQ ID NO: 40756 - protein, 7 aa, synthetic construct
CAPYLAE

SEQ ID NO: 40757 - protein, 7 aa, synthetic construct
CSPMRTP

SEQ ID NO: 40758 - protein, 7 aa, synthetic construct
CKPQMPT

SEQ ID NO: 40759 - protein, 7 aa, synthetic construct
FFTGTHE

SEQ ID NO: 40760 - protein, 7 aa, synthetic construct
TWDGDNA

SEQ ID NO: 40761 - protein, 7 aa, synthetic construct
MCEKAKD

SEQ ID NO: 40762 - protein, 7 aa, synthetic construct
YFQGVVA

SEQ ID NO: 40763 - protein, 7 aa, synthetic construct
KGDHVRW

SEQ ID NO: 40764 - protein, 7 aa, synthetic construct
REPTCPY

SEQ ID NO: 40765 - protein, 7 aa, synthetic construct
FFSGERE

SEQ ID NO: 40766 - protein, 7 aa, synthetic construct
CNKKMGD

SEQ ID NO: 40767 - protein, 7 aa, synthetic construct
YHKLDNM

SEQ ID NO: 40768 - protein, 7 aa, synthetic construct
VMEDRSW

SEQ ID NO: 40769 - protein, 7 aa, synthetic construct
GSEYSSY

SEQ ID NO: 40770 - protein, 7 aa, synthetic construct
CAPTLHE

SEQ ID NO: 40771 - protein, 7 aa, synthetic construct
IRDYKTC

SEQ ID NO: 40772 - protein, 7 aa, synthetic construct
YWSQVQA

SEQ ID NO: 40773 - protein, 7 aa, synthetic construct
QRGVGMC

SEQ ID NO: 40774 - protein, 7 aa, synthetic construct
YFAGKTS

SEQ ID NO: 40775 - protein, 7 aa, synthetic construct
CRSTNGV

SEQ ID NO: 40776 - protein, 7 aa, synthetic construct
SDGYSKW

SEQ ID NO: 40777 - protein, 7 aa, synthetic construct
FWSGMVA

SEQ ID NO: 40778 - protein, 7 aa, synthetic construct
GGGSSSW

SEQ ID NO: 40779 - protein, 7 aa, synthetic construct
FWSGIPE

SEQ ID NO: 40780 - protein, 7 aa, synthetic construct
LWDGTVA

SEQ ID NO: 40781 - protein, 7 aa, synthetic construct
YSRLDNL

SEQ ID NO: 40782 - protein, 7 aa, synthetic construct
YWSGQLE

SEQ ID NO: 40783 - protein, 7 aa, synthetic construct
CKSDRKE

SEQ ID NO: 40784 - protein, 7 aa, synthetic construct
TTEGVRW

SEQ ID NO: 40785 - protein, 7 aa, synthetic construct
DLSSTQW

SEQ ID NO: 40786 - protein, 7 aa, synthetic construct
CKPAMHE

SEQ ID NO: 40787 - protein, 7 aa, synthetic construct
CRPPMLE

SEQ ID NO: 40788 - protein, 7 aa, synthetic construct
CMSKTGH

SEQ ID NO: 40789 - protein, 7 aa, synthetic construct
YARLSPM

SEQ ID NO: 40790 - protein, 7 aa, synthetic construct
RTYDTYA

SEQ ID NO: 40791 - protein, 7 aa, synthetic construct
TDGSCKA

SEQ ID NO: 40792 - protein, 7 aa, synthetic construct
CAPDARE

SEQ ID NO: 40793 - protein, 7 aa, synthetic construct
CKPGAGE

SEQ ID NO: 40794 - protein, 7 aa, synthetic construct
RDAASSW

SEQ ID NO: 40795 - protein, 7 aa, synthetic construct
DMASMKW

SEQ ID NO: 40796 - protein, 7 aa, synthetic construct
RDNGCKE

SEQ ID NO: 40797 - protein, 7 aa, synthetic construct
YWSEIRE

SEQ ID NO: 40798 - protein, 7 aa, synthetic construct
NAAVGNC

SEQ ID NO: 40799 - protein, 7 aa, synthetic construct
GSPGVQW

SEQ ID NO: 40800 - protein, 7 aa, synthetic construct
NLESREW

SEQ ID NO: 40801 - protein, 7 aa, synthetic construct
MKGSCEQ

SEQ ID NO: 40802 - protein, 7 aa, synthetic construct
KDDFVVF

SEQ ID NO: 40803 - protein, 7 aa, synthetic construct
YWAGKYD

SEQ ID NO: 40804 - protein, 7 aa, synthetic construct
CRPSGLE

SEQ ID NO: 40805 - protein, 7 aa, synthetic construct
GAGTKCG

SEQ ID NO: 40806 - protein, 7 aa, synthetic construct
CKGPYSE

SEQ ID NO: 40807 - protein, 7 aa, synthetic construct
RDPGVRW

SEQ ID NO: 40808 - protein, 7 aa, synthetic construct
YNNKTTC

SEQ ID NO: 40809 - protein, 7 aa, synthetic construct
YYSGQRD

SEQ ID NO: 40810 - protein, 7 aa, synthetic construct
CKPGSPI

SEQ ID NO: 40811 - protein, 7 aa, synthetic construct
YFSGMPL

SEQ ID NO: 40812 - protein, 7 aa, synthetic construct
GGGVSRW

SEQ ID NO: 40813 - protein, 7 aa, synthetic construct
TEPGCKE

SEQ ID NO: 40814 - protein, 7 aa, synthetic construct
YFHGMTD

SEQ ID NO: 40815 - protein, 7 aa, synthetic construct
FFSGRLE

SEQ ID NO: 40816 - protein, 7 aa, synthetic construct
GGMGSQW

SEQ ID NO: 40817 - protein, 7 aa, synthetic construct
CKPQAGP

SEQ ID NO: 40818 - protein, 7 aa, synthetic construct
FFTGACD

SEQ ID NO: 40819 - protein, 7 aa, synthetic construct
GGSGTQC

SEQ ID NO: 40820 - protein, 7 aa, synthetic construct
WSAAVQC

SEQ ID NO: 40821 - protein, 7 aa, synthetic construct
CNKPMIA

SEQ ID NO: 40822 - protein, 7 aa, synthetic construct
CKPQAGT

SEQ ID NO: 40823 - protein, 7 aa, synthetic construct
KGDSRDW

SEQ ID NO: 40824 - protein, 7 aa, synthetic construct
VPERCPL

SEQ ID NO: 40825 - protein, 7 aa, synthetic construct
GCRHGDS

SEQ ID NO: 40826 - protein, 7 aa, synthetic construct
SMQDRMW

SEQ ID NO: 40827 - protein, 7 aa, synthetic construct
YFQGIQA

SEQ ID NO: 40828 - protein, 7 aa, synthetic construct
WWSAIRE

SEQ ID NO: 40829 - protein, 7 aa, synthetic construct
YSRLSEF

SEQ ID NO: 40830 - protein, 7 aa, synthetic construct
WTHMCKA

SEQ ID NO: 40831 - protein, 7 aa, synthetic construct
RAEAVRW

SEQ ID NO: 40832 - protein, 7 aa, synthetic construct
YWSGQVE

SEQ ID NO: 40833 - protein, 7 aa, synthetic construct
SMQDRHW

SEQ ID NO: 40834 - protein, 7 aa, synthetic construct
YVAQCQV

SEQ ID NO: 40835 - protein, 7 aa, synthetic construct
TWSGDNA

SEQ ID NO: 40836 - protein, 7 aa, synthetic construct
IAHEGAG

SEQ ID NO: 40837 - protein, 7 aa, synthetic construct
DLGDRKW

SEQ ID NO: 40838 - protein, 7 aa, synthetic construct
KFDFTGV

SEQ ID NO: 40839 - protein, 7 aa, synthetic construct
YEYGCKE

SEQ ID NO: 40840 - protein, 7 aa, synthetic construct
RDDGSYW

SEQ ID NO: 40841 - protein, 7 aa, synthetic construct
TWDGYDA

SEQ ID NO: 40842 - protein, 7 aa, synthetic construct
RDDFSPY

SEQ ID NO: 40843 - protein, 7 aa, synthetic construct
RNEFSGF

SEQ ID NO: 40844 - protein, 7 aa, synthetic construct
CKPQALT

SEQ ID NO: 40845 - protein, 7 aa, synthetic construct
YKSNTTC

SEQ ID NO: 40846 - protein, 7 aa, synthetic construct
RDEFLSY

SEQ ID NO: 40847 - protein, 7 aa, synthetic construct
CTSKVGH

SEQ ID NO: 40848 - protein, 7 aa, synthetic construct
CRPQAGA

SEQ ID NO: 40849 - protein, 7 aa, synthetic construct
CKMPGMD

SEQ ID NO: 40850 - protein, 7 aa, synthetic construct
YSRFHLN

SEQ ID NO: 40851 - protein, 7 aa, synthetic construct
FTKSCPV

SEQ ID NO: 40852 - protein, 7 aa, synthetic construct
QYARSMM

SEQ ID NO: 40853 - protein, 7 aa, synthetic construct
REGTSSW

SEQ ID NO: 40854 - protein, 7 aa, synthetic construct
GNATSHW

SEQ ID NO: 40855 - protein, 7 aa, synthetic construct
CKPPMFE

SEQ ID NO: 40856 - protein, 7 aa, synthetic construct
YWSAVTE

SEQ ID NO: 40857 - protein, 7 aa, synthetic construct
CAKQCKP

SEQ ID NO: 40858 - protein, 7 aa, synthetic construct
CNKPSTA

SEQ ID NO: 40859 - protein, 7 aa, synthetic construct
CKLPKME

SEQ ID NO: 40860 - protein, 7 aa, synthetic construct
YWHGKPD

SEQ ID NO: 40861 - protein, 7 aa, synthetic construct
AGHDRGW

SEQ ID NO: 40862 - protein, 7 aa, synthetic construct
RMEEVFP

SEQ ID NO: 40863 - protein, 7 aa, synthetic construct
MTGTSCP

SEQ ID NO: 40864 - protein, 7 aa, synthetic construct
NMQDRSW

SEQ ID NO: 40865 - protein, 7 aa, synthetic construct
FWSGKLE

SEQ ID NO: 40866 - protein, 7 aa, synthetic construct
DGSNKSC

SEQ ID NO: 40867 - protein, 7 aa, synthetic construct
CKPMQMP

SEQ ID NO: 40868 - protein, 7 aa, synthetic construct
GGEASRW

SEQ ID NO: 40869 - protein, 7 aa, synthetic construct
MEDYVSY

SEQ ID NO: 40870 - protein, 7 aa, synthetic construct
YEPGCKI

SEQ ID NO: 40871 - protein, 7 aa, synthetic construct
KDDFNIF

SEQ ID NO: 40872 - protein, 7 aa, synthetic construct
YFHGRPD

SEQ ID NO: 40873 - protein, 7 aa, synthetic construct
LPKMGCA

SEQ ID NO: 40874 - protein, 7 aa, synthetic construct
CKAPKYD

SEQ ID NO: 40875 - protein, 7 aa, synthetic construct
CKPPSRD

SEQ ID NO: 40876 - protein, 7 aa, synthetic construct
KFDGTEC

SEQ ID NO: 40877 - protein, 7 aa, synthetic construct
KSDYMVY

SEQ ID NO: 40878 - protein, 7 aa, synthetic construct
CKPERMS

SEQ ID NO: 40879 - protein, 7 aa, synthetic construct
PCPVKPD

SEQ ID NO: 40880 - protein, 7 aa, synthetic construct
YFTGAHE

SEQ ID NO: 40881 - protein, 7 aa, synthetic construct
RGGDRAW

SEQ ID NO: 40882 - protein, 7 aa, synthetic construct
GWGTKCG

SEQ ID NO: 40883 - protein, 7 aa, synthetic construct
MNNSTKC

SEQ ID NO: 40884 - protein, 7 aa, synthetic construct
GIEHVRW

SEQ ID NO: 40885 - protein, 7 aa, synthetic construct
SDGASKW

SEQ ID NO: 40886 - protein, 7 aa, synthetic construct
CQKPMTA

SEQ ID NO: 40887 - protein, 7 aa, synthetic construct
YFTGNID

SEQ ID NO: 40888 - protein, 7 aa, synthetic construct
YYTGRAE

SEQ ID NO: 40889 - protein, 7 aa, synthetic construct
CNTPMTA

SEQ ID NO: 40890 - protein, 7 aa, synthetic construct
KKDHSCD

SEQ ID NO: 40891 - protein, 7 aa, synthetic construct
MDDWVVY

SEQ ID NO: 40892 - protein, 7 aa, synthetic construct
CKSVCKP

SEQ ID NO: 40893 - protein, 7 aa, synthetic construct
KNDYNSW

SEQ ID NO: 40894 - protein, 7 aa, synthetic construct
RSDTVYW

SEQ ID NO: 40895 - protein, 7 aa, synthetic construct
ETPMCKA

SEQ ID NO: 40896 - protein, 7 aa, synthetic construct
FKGSCEQ

SEQ ID NO: 40897 - protein, 7 aa, synthetic construct
CMPDYRE

SEQ ID NO: 40898 - protein, 7 aa, synthetic construct
NCKPCLT

SEQ ID NO: 40899 - protein, 7 aa, synthetic construct
GSEFEKW

SEQ ID NO: 40900 - protein, 7 aa, synthetic construct
YGKSTEC

SEQ ID NO: 40901 - protein, 7 aa, synthetic construct
CKPTSIE

SEQ ID NO: 40902 - protein, 7 aa, synthetic construct
DLQSSNW

SEQ ID NO: 40903 - protein, 7 aa, synthetic construct
YWSGQHA

SEQ ID NO: 40904 - protein, 7 aa, synthetic construct
FFSGVVK

SEQ ID NO: 40905 - protein, 7 aa, synthetic construct
ICRPCSE

SEQ ID NO: 40906 - protein, 7 aa, synthetic construct
PDGSCKA

SEQ ID NO: 40907 - protein, 7 aa, synthetic construct
CAPDYRI

SEQ ID NO: 40908 - protein, 7 aa, synthetic construct
RMQDRSW

SEQ ID NO: 40909 - protein, 7 aa, synthetic construct
WFTGVKE

SEQ ID NO: 40910 - protein, 7 aa, synthetic construct
MMQDRSW

SEQ ID NO: 40911 - protein, 7 aa, synthetic construct
CKPVPPE

SEQ ID NO: 40912 - protein, 7 aa, synthetic construct
GGNGSTW

SEQ ID NO: 40913 - protein, 7 aa, synthetic construct
GCGTKNG

SEQ ID NO: 40914 - protein, 7 aa, synthetic construct
YWSGRVD

SEQ ID NO: 40915 - protein, 7 aa, synthetic construct
CKMPGRD

SEQ ID NO: 40916 - protein, 7 aa, synthetic construct
REETVGW

SEQ ID NO: 40917 - protein, 7 aa, synthetic construct
TRNGQEC

SEQ ID NO: 40918 - protein, 7 aa, synthetic construct
GHGTKCG

SEQ ID NO: 40919 - protein, 7 aa, synthetic construct
REDFQTW

SEQ ID NO: 40920 - protein, 7 aa, synthetic construct
IKDYKGC

SEQ ID NO: 40921 - protein, 7 aa, synthetic construct
CRPEGAC

SEQ ID NO: 40922 - protein, 7 aa, synthetic construct
FSKLNPD

SEQ ID NO: 40923 - protein, 7 aa, synthetic construct
ESEFKTY

SEQ ID NO: 40924 - protein, 7 aa, synthetic construct
GGESCKS

SEQ ID NO: 40925 - protein, 7 aa, synthetic construct
ELSSPKW

SEQ ID NO: 40926 - protein, 7 aa, synthetic construct
VSEYKTF

SEQ ID NO: 40927 - protein, 7 aa, synthetic construct
CKPMMGE

SEQ ID NO: 40928 - protein, 7 aa, synthetic construct
CTSITGH

SEQ ID NO: 40929 - protein, 7 aa, synthetic construct
YWSGRNE

SEQ ID NO: 40930 - protein, 7 aa, synthetic construct
YWTGQMD

SEQ ID NO: 40931 - protein, 7 aa, synthetic construct
YFTAIVE

SEQ ID NO: 40932 - protein, 7 aa, synthetic construct
ITGGKTC

SEQ ID NO: 40933 - protein, 7 aa, synthetic construct
YFQGKLE

SEQ ID NO: 40934 - protein, 7 aa, synthetic construct
CNKPHTA

SEQ ID NO: 40935 - protein, 7 aa, synthetic construct
YEGGCKE

SEQ ID NO: 40936 - protein, 7 aa, synthetic construct
VPQDRAW

SEQ ID NO: 40937 - protein, 7 aa, synthetic construct
YSRITPN

SEQ ID NO: 40938 - protein, 7 aa, synthetic construct
GQDSVKC

SEQ ID NO: 40939 - protein, 7 aa, synthetic construct
KPDWVEF

SEQ ID NO: 40940 - protein, 7 aa, synthetic construct
ALPPKCS

SEQ ID NO: 40941 - protein, 7 aa, synthetic construct
CTGKTGH

SEQ ID NO: 40942 - protein, 7 aa, synthetic construct
FFTGIVS

SEQ ID NO: 40943 - protein, 7 aa, synthetic construct
TPYDAIA

SEQ ID NO: 40944 - protein, 7 aa, synthetic construct
GCGTKQG

SEQ ID NO: 40945 - protein, 7 aa, synthetic construct
FFTGTVE

SEQ ID NO: 40946 - protein, 7 aa, synthetic construct
RNEFTAY

SEQ ID NO: 40947 - protein, 7 aa, synthetic construct
RDPCTVD

SEQ ID NO: 40948 - protein, 7 aa, synthetic construct
GSGTSTW

SEQ ID NO: 40949 - protein, 7 aa, synthetic construct
QPSPCKP

SEQ ID NO: 40950 - protein, 7 aa, synthetic construct
YSRLDVF

SEQ ID NO: 40951 - protein, 7 aa, synthetic construct
GAATSKW

SEQ ID NO: 40952 - protein, 7 aa, synthetic construct
YSRLDSF

SEQ ID NO: 40953 - protein, 7 aa, synthetic construct
REEAIRW

SEQ ID NO: 40954 - protein, 7 aa, synthetic construct
VMQDRSW

SEQ ID NO: 40955 - protein, 7 aa, synthetic construct
IARTGCD

SEQ ID NO: 40956 - protein, 7 aa, synthetic construct
VHKLCPV

SEQ ID NO: 40957 - protein, 7 aa, synthetic construct
WFTGRHD

SEQ ID NO: 40958 - protein, 7 aa, synthetic construct
CGKSGPS

SEQ ID NO: 40959 - protein, 7 aa, synthetic construct
EGGSCKP

SEQ ID NO: 40960 - protein, 7 aa, synthetic construct
DNRGMIA

SEQ ID NO: 40961 - protein, 7 aa, synthetic construct
LGIGCCK

SEQ ID NO: 40962 - protein, 7 aa, synthetic construct
WTPNCKA

SEQ ID NO: 40963 - protein, 7 aa, synthetic construct
CGPYLHE

SEQ ID NO: 40964 - protein, 7 aa, synthetic construct
WYSGVKE

SEQ ID NO: 40965 - protein, 7 aa, synthetic construct
CKNTKVD

SEQ ID NO: 40966 - protein, 7 aa, synthetic construct
WQSTNGI

SEQ ID NO: 40967 - protein, 7 aa, synthetic construct
KFDYQGT

SEQ ID NO: 40968 - protein, 7 aa, synthetic construct
GSGNQRW

SEQ ID NO: 40969 - protein, 7 aa, synthetic construct
WYSGVRE

SEQ ID NO: 40970 - protein, 7 aa, synthetic construct
MHRLQED

SEQ ID NO: 40971 - protein, 7 aa, synthetic construct
YFTARVE

SEQ ID NO: 40972 - protein, 7 aa, synthetic construct
FFAGVKE

SEQ ID NO: 40973 - protein, 7 aa, synthetic construct
CTSKQGH

SEQ ID NO: 40974 - protein, 7 aa, synthetic construct
YTRLDGN

SEQ ID NO: 40975 - protein, 7 aa, synthetic construct
FFTGMVD

SEQ ID NO: 40976 - protein, 7 aa, synthetic construct
LSRAGYD

SEQ ID NO: 40977 - protein, 7 aa, synthetic construct
NKEGCKP

SEQ ID NO: 40978 - protein, 7 aa, synthetic construct
YTRLQNL

SEQ ID NO: 40979 - protein, 7 aa, synthetic construct
CKTKLLE

SEQ ID NO: 40980 - protein, 7 aa, synthetic construct
VPCPVPP

SEQ ID NO: 40981 - protein, 7 aa, synthetic construct
YPPGCKE

SEQ ID NO: 40982 - protein, 7 aa, synthetic construct
TRWGDNA

SEQ ID NO: 40983 - protein, 7 aa, synthetic construct
CKMSCPM

SEQ ID NO: 40984 - protein, 7 aa, synthetic construct
GVESVRW

SEQ ID NO: 40985 - protein, 7 aa, synthetic construct
YWSGQLD

SEQ ID NO: 40986 - protein, 7 aa, synthetic construct
YTKSQVD

SEQ ID NO: 40987 - protein, 7 aa, synthetic construct
SDGNSKW

SEQ ID NO: 40988 - protein, 7 aa, synthetic construct
RDGESSW

SEQ ID NO: 40989 - protein, 7 aa, synthetic construct
CEARPIE

SEQ ID NO: 40990 - protein, 7 aa, synthetic construct
WFSKVIE

SEQ ID NO: 40991 - protein, 7 aa, synthetic construct
FYSGVKE

SEQ ID NO: 40992 - protein, 7 aa, synthetic construct
TDGYSRY

SEQ ID NO: 40993 - protein, 7 aa, synthetic construct
CGKIKCA

SEQ ID NO: 40994 - protein, 7 aa, synthetic construct
GSEFTSY

SEQ ID NO: 40995 - protein, 7 aa, synthetic construct
KNDHVRW

SEQ ID NO: 40996 - protein, 7 aa, synthetic construct
YDRLSCN

SEQ ID NO: 40997 - protein, 7 aa, synthetic construct
NKLKDCN

SEQ ID NO: 40998 - protein, 7 aa, synthetic construct
CSKPTPS

SEQ ID NO: 40999 - protein, 7 aa, synthetic construct
LMDGTSA

SEQ ID NO: 41000 - protein, 7 aa, synthetic construct
CKPLARD

SEQ ID NO: 41001 - protein, 7 aa, synthetic construct
IDEFLSW

SEQ ID NO: 41002 - protein, 7 aa, synthetic construct
MRSTNGV

SEQ ID NO: 41003 - protein, 7 aa, synthetic construct
WPPMCKA

SEQ ID NO: 41004 - protein, 7 aa, synthetic construct
CKIPGVP

SEQ ID NO: 41005 - protein, 7 aa, synthetic construct
CKPDKPL

SEQ ID NO: 41006 - protein, 7 aa, synthetic construct
RNDGVRW

SEQ ID NO: 41007 - protein, 7 aa, synthetic construct
CKPQTPT

SEQ ID NO: 41008 - protein, 7 aa, synthetic construct
DMSSMSW

SEQ ID NO: 41009 - protein, 7 aa, synthetic construct
GGGTSKW

SEQ ID NO: 41010 - protein, 7 aa, synthetic construct
YARGSNN

SEQ ID NO: 41011 - protein, 7 aa, synthetic construct
YFSNVKS

SEQ ID NO: 41012 - protein, 7 aa, synthetic construct
TKEGMCI

SEQ ID NO: 41013 - protein, 7 aa, synthetic construct
CSKKPCG

SEQ ID NO: 41014 - protein, 7 aa, synthetic construct
TRNESFC

SEQ ID NO: 41015 - protein, 7 aa, synthetic construct
WFSGQRD

SEQ ID NO: 41016 - protein, 7 aa, synthetic construct
CQRKCVP

SEQ ID NO: 41017 - protein, 7 aa, synthetic construct
CNNPMTA

SEQ ID NO: 41018 - protein, 7 aa, synthetic construct
YWSSVKD

SEQ ID NO: 41019 - protein, 7 aa, synthetic construct
VCRPCSE

SEQ ID NO: 41020 - protein, 7 aa, synthetic construct
GCRVGDI

SEQ ID NO: 41021 - protein, 7 aa, synthetic construct
FWTGMRE

SEQ ID NO: 41022 - protein, 7 aa, synthetic construct
YVKSQPV

SEQ ID NO: 41023 - protein, 7 aa, synthetic construct
FWSGTVE

SEQ ID NO: 41024 - protein, 7 aa, synthetic construct
CAPDKRE

SEQ ID NO: 41025 - protein, 7 aa, synthetic construct
YYSGVKV

SEQ ID NO: 41026 - protein, 7 aa, synthetic construct
CKANAPD

SEQ ID NO: 41027 - protein, 7 aa, synthetic construct
FARACQN

SEQ ID NO: 41028 - protein, 7 aa, synthetic construct
YYTGVMS

SEQ ID NO: 41029 - protein, 7 aa, synthetic construct
TFYGANA

SEQ ID NO: 41030 - protein, 7 aa, synthetic construct
GCGTKCQ

SEQ ID NO: 41031 - protein, 7 aa, synthetic construct
CNGTGPS

SEQ ID NO: 41032 - protein, 7 aa, synthetic construct
GGGTSAW

SEQ ID NO: 41033 - protein, 7 aa, synthetic construct
YFTARID

SEQ ID NO: 41034 - protein, 7 aa, synthetic construct
CRPGAIA

SEQ ID NO: 41035 - protein, 7 aa, synthetic construct
QKAGQEC

SEQ ID NO: 41036 - protein, 7 aa, synthetic construct
YKGGEPC

SEQ ID NO: 41037 - protein, 7 aa, synthetic construct
CKKFKED

SEQ ID NO: 41038 - protein, 7 aa, synthetic construct
GGHTSTW

SEQ ID NO: 41039 - protein, 7 aa, synthetic construct
LGDVMKC

SEQ ID NO: 41040 - protein, 7 aa, synthetic construct
GIGTKCG

SEQ ID NO: 41041 - protein, 7 aa, synthetic construct
KNDYITY

SEQ ID NO: 41042 - protein, 7 aa, synthetic construct
CKGDSKL

SEQ ID NO: 41043 - protein, 7 aa, synthetic construct
VSTHNCA

SEQ ID NO: 41044 - protein, 7 aa, synthetic construct
NKGEGGC

SEQ ID NO: 41045 - protein, 7 aa, synthetic construct
YFSGITT

SEQ ID NO: 41046 - protein, 7 aa, synthetic construct
WTPMCNA

SEQ ID NO: 41047 - protein, 7 aa, synthetic construct
SRPTCPA

SEQ ID NO: 41048 - protein, 7 aa, synthetic construct
PCGGKPI

SEQ ID NO: 41049 - protein, 7 aa, synthetic construct
FWGGVKE

SEQ ID NO: 41050 - protein, 7 aa, synthetic construct
WARGHDC

SEQ ID NO: 41051 - protein, 7 aa, synthetic construct
LHRLSDW

SEQ ID NO: 41052 - protein, 7 aa, synthetic construct
KDEYMYF

SEQ ID NO: 41053 - protein, 7 aa, synthetic construct
CKGDAKA

SEQ ID NO: 41054 - protein, 7 aa, synthetic construct
VAERGCG

SEQ ID NO: 41055 - protein, 7 aa, synthetic construct
CKPHKLD

SEQ ID NO: 41056 - protein, 7 aa, synthetic construct
YWAGVID

SEQ ID NO: 41057 - protein, 7 aa, synthetic construct
YSRIDNN

SEQ ID NO: 41058 - protein, 7 aa, synthetic construct
YWSHVKD

SEQ ID NO: 41059 - protein, 7 aa, synthetic construct
GAPTCCA

SEQ ID NO: 41060 - protein, 7 aa, synthetic construct
CNGPMTA

SEQ ID NO: 41061 - protein, 7 aa, synthetic construct
EGPIGQC

SEQ ID NO: 41062 - protein, 7 aa, synthetic construct
YYTGRAD

SEQ ID NO: 41063 - protein, 7 aa, synthetic construct
ISGGTAG

SEQ ID NO: 41064 - protein, 7 aa, synthetic construct
RSPDVFP

SEQ ID NO: 41065 - protein, 7 aa, synthetic construct
EMQDRSW

SEQ ID NO: 41066 - protein, 7 aa, synthetic construct
RGDEVFP

SEQ ID NO: 41067 - protein, 7 aa, synthetic construct
VGQRCAE

SEQ ID NO: 41068 - protein, 7 aa, synthetic construct
GSIGVSW

SEQ ID NO: 41069 - protein, 7 aa, synthetic construct
CRPDVKG

SEQ ID NO: 41070 - protein, 7 aa, synthetic construct
YFSQIVA

SEQ ID NO: 41071 - protein, 7 aa, synthetic construct
FFSGVQE

SEQ ID NO: 41072 - protein, 7 aa, synthetic construct
YYSGQRA

SEQ ID NO: 41073 - protein, 7 aa, synthetic construct
CKRGDAA

SEQ ID NO: 41074 - protein, 7 aa, synthetic construct
TWSGVVA

SEQ ID NO: 41075 - protein, 7 aa, synthetic construct
CAPYLLE

SEQ ID NO: 41076 - protein, 7 aa, synthetic construct
RGEFMSY

SEQ ID NO: 41077 - protein, 7 aa, synthetic construct
FFAGIRE

SEQ ID NO: 41078 - protein, 7 aa, synthetic construct
RGERCPD

SEQ ID NO: 41079 - protein, 7 aa, synthetic construct
FCRPCSE

SEQ ID NO: 41080 - protein, 7 aa, synthetic construct
YARGDNG

SEQ ID NO: 41081 - protein, 7 aa, synthetic construct
RMDSVVW

SEQ ID NO: 41082 - protein, 7 aa, synthetic construct
YFTGKEE

SEQ ID NO: 41083 - protein, 7 aa, synthetic construct
CRPSPGI

SEQ ID NO: 41084 - protein, 7 aa, synthetic construct
GPMSCKE

SEQ ID NO: 41085 - protein, 7 aa, synthetic construct
WWTGMPD

SEQ ID NO: 41086 - protein, 7 aa, synthetic construct
NTPMCKA

SEQ ID NO: 41087 - protein, 7 aa, synthetic construct
YFVGRTD

SEQ ID NO: 41088 - protein, 7 aa, synthetic construct
YWSGRPE

SEQ ID NO: 41089 - protein, 7 aa, synthetic construct
CKAGCKD

SEQ ID NO: 41090 - protein, 7 aa, synthetic construct
CTSQTGH

SEQ ID NO: 41091 - protein, 7 aa, synthetic construct
VEPTCKD

SEQ ID NO: 41092 - protein, 7 aa, synthetic construct
YFSNVRS

SEQ ID NO: 41093 - protein, 7 aa, synthetic construct
LWNGTAP

SEQ ID NO: 41094 - protein, 7 aa, synthetic construct
CRESTER

SEQ ID NO: 41095 - protein, 7 aa, synthetic construct
LGLGCCG

SEQ ID NO: 41096 - protein, 7 aa, synthetic construct
CSRIGPN

SEQ ID NO: 41097 - protein, 7 aa, synthetic construct
VPQRCAP

SEQ ID NO: 41098 - protein, 7 aa, synthetic construct
CKKDKEV

SEQ ID NO: 41099 - protein, 7 aa, synthetic construct
CAPYTHE

SEQ ID NO: 41100 - protein, 7 aa, synthetic construct
YFAGRAE

SEQ ID NO: 41101 - protein, 7 aa, synthetic construct
YFSGLMA

SEQ ID NO: 41102 - protein, 7 aa, synthetic construct
FDGSCKA

SEQ ID NO: 41103 - protein, 7 aa, synthetic construct
RGETSSW

SEQ ID NO: 41104 - protein, 7 aa, synthetic construct
YYSGVAL

SEQ ID NO: 41105 - protein, 7 aa, synthetic construct
SDGVSAW

SEQ ID NO: 41106 - protein, 7 aa, synthetic construct
GSEFKSY

SEQ ID NO: 41107 - protein, 7 aa, synthetic construct
TGDWTPF

SEQ ID NO: 41108 - protein, 7 aa, synthetic construct
FWSGTFE

SEQ ID NO: 41109 - protein, 7 aa, synthetic construct
CTSKIGH

SEQ ID NO: 41110 - protein, 7 aa, synthetic construct
SMRDRSW

SEQ ID NO: 41111 - protein, 7 aa, synthetic construct
GDEYIMY

SEQ ID NO: 41112 - protein, 7 aa, synthetic construct
VPTTPCM

SEQ ID NO: 41113 - protein, 7 aa, synthetic construct
PMGSAEW

SEQ ID NO: 41114 - protein, 7 aa, synthetic construct
YSRLDYD

SEQ ID NO: 41115 - protein, 7 aa, synthetic construct
DDGVSKW

SEQ ID NO: 41116 - protein, 7 aa, synthetic construct
MTGTSCS

SEQ ID NO: 41117 - protein, 7 aa, synthetic construct
YFTGHTM

SEQ ID NO: 41118 - protein, 7 aa, synthetic construct
YYTGQVT

SEQ ID NO: 41119 - protein, 7 aa, synthetic construct
IDGSCKA

SEQ ID NO: 41120 - protein, 7 aa, synthetic construct
QCRPCSE

SEQ ID NO: 41121 - protein, 7 aa, synthetic construct
RSEYHFP

SEQ ID NO: 41122 - protein, 7 aa, synthetic construct
VKPDNTC

SEQ ID NO: 41123 - protein, 7 aa, synthetic construct
CKPGPIG

SEQ ID NO: 41124 - protein, 7 aa, synthetic construct
QTGGGSC

SEQ ID NO: 41125 - protein, 7 aa, synthetic construct
YWAGIPE

SEQ ID NO: 41126 - protein, 7 aa, synthetic construct
CNKAMTA

SEQ ID NO: 41127 - protein, 7 aa, synthetic construct
CKMSCPL

SEQ ID NO: 41128 - protein, 7 aa, synthetic construct
CKGLKVE

SEQ ID NO: 41129 - protein, 7 aa, synthetic construct
RQTACPA

SEQ ID NO: 41130 - protein, 7 aa, synthetic construct
TFYGDAA

SEQ ID NO: 41131 - protein, 7 aa, synthetic construct
EEEKCRE

SEQ ID NO: 41132 - protein, 7 aa, synthetic construct
FFHGKVE

SEQ ID NO: 41133 - protein, 7 aa, synthetic construct
YWTAKPD

SEQ ID NO: 41134 - protein, 7 aa, synthetic construct
CFSKTGH

SEQ ID NO: 41135 - protein, 7 aa, synthetic construct
IDSGKAC

SEQ ID NO: 41136 - protein, 7 aa, synthetic construct
MERTQMC

SEQ ID NO: 41137 - protein, 7 aa, synthetic construct
YARGSIN

SEQ ID NO: 41138 - protein, 7 aa, synthetic construct
LHRLHQD

SEQ ID NO: 41139 - protein, 7 aa, synthetic construct
RTWDAIV

SEQ ID NO: 41140 - protein, 7 aa, synthetic construct
VKSSEAC

SEQ ID NO: 41141 - protein, 7 aa, synthetic construct
PGPMKPC

SEQ ID NO: 41142 - protein, 7 aa, synthetic construct
CNHPMTA

SEQ ID NO: 41143 - protein, 7 aa, synthetic construct
RSETSSW

SEQ ID NO: 41144 - protein, 7 aa, synthetic construct
LPRTGDC

SEQ ID NO: 41145 - protein, 7 aa, synthetic construct
KEGTSRW

SEQ ID NO: 41146 - protein, 7 aa, synthetic construct
KADHLKW

SEQ ID NO: 41147 - protein, 7 aa, synthetic construct
DRKPCPA

SEQ ID NO: 41148 - protein, 7 aa, synthetic construct
YFTHRYD

SEQ ID NO: 41149 - protein, 7 aa, synthetic construct
YHRLDND

SEQ ID NO: 41150 - protein, 7 aa, synthetic construct
AGATSTW

SEQ ID NO: 41151 - protein, 7 aa, synthetic construct
CKARPCG

SEQ ID NO: 41152 - protein, 7 aa, synthetic construct
RSEFTVF

SEQ ID NO: 41153 - protein, 7 aa, synthetic construct
CKASKCA

SEQ ID NO: 41154 - protein, 7 aa, synthetic construct
CKTITND

SEQ ID NO: 41155 - protein, 7 aa, synthetic construct
CNKPQTA

SEQ ID NO: 41156 - protein, 7 aa, synthetic construct
HDDFTVM

SEQ ID NO: 41157 - protein, 7 aa, synthetic construct
NKSEGAC

SEQ ID NO: 41158 - protein, 7 aa, synthetic construct
PFARSAE

SEQ ID NO: 41159 - protein, 7 aa, synthetic construct
FFSGRHE

SEQ ID NO: 41160 - protein, 7 aa, synthetic construct
YWSAKLD

SEQ ID NO: 41161 - protein, 7 aa, synthetic construct
YWSGTRA

SEQ ID NO: 41162 - protein, 7 aa, synthetic construct
CNKMMTA

SEQ ID NO: 41163 - protein, 7 aa, synthetic construct
GGGTVRW

SEQ ID NO: 41164 - protein, 7 aa, synthetic construct
WTGMCKA

SEQ ID NO: 41165 - protein, 7 aa, synthetic construct
CAPYLHS

SEQ ID NO: 41166 - protein, 7 aa, synthetic construct
TNNAKDC

SEQ ID NO: 41167 - protein, 7 aa, synthetic construct
YWSEIRA

SEQ ID NO: 41168 - protein, 7 aa, synthetic construct
TNREGEC

SEQ ID NO: 41169 - protein, 7 aa, synthetic construct
CQSKNGV

SEQ ID NO: 41170 - protein, 7 aa, synthetic construct
YYTGISE

SEQ ID NO: 41171 - protein, 7 aa, synthetic construct
FSTHCCA

SEQ ID NO: 41172 - protein, 7 aa, synthetic construct
ILKSCPI

SEQ ID NO: 41173 - protein, 7 aa, synthetic construct
RSEFRSY

SEQ ID NO: 41174 - protein, 7 aa, synthetic construct
WLKSQGN

SEQ ID NO: 41175 - protein, 7 aa, synthetic construct
RTPTCKE

SEQ ID NO: 41176 - protein, 7 aa, synthetic construct
YWGGVTA

SEQ ID NO: 41177 - protein, 7 aa, synthetic construct
GNEAGKC

SEQ ID NO: 41178 - protein, 7 aa, synthetic construct
YFSGMTS

SEQ ID NO: 41179 - protein, 7 aa, synthetic construct
CKTSPLG

SEQ ID NO: 41180 - protein, 7 aa, synthetic construct
GSEFRSW

SEQ ID NO: 41181 - protein, 7 aa, synthetic construct
GCGTKIG

SEQ ID NO: 41182 - protein, 7 aa, synthetic construct
WWHGKPD

SEQ ID NO: 41183 - protein, 7 aa, synthetic construct
CKIPEKV

SEQ ID NO: 41184 - protein, 7 aa, synthetic construct
LWNGTPS

SEQ ID NO: 41185 - protein, 7 aa, synthetic construct
RGGSSGW

SEQ ID NO: 41186 - protein, 7 aa, synthetic construct
MTGTQCL

SEQ ID NO: 41187 - protein, 7 aa, synthetic construct
YWSGIPP

SEQ ID NO: 41188 - protein, 7 aa, synthetic construct
QSKASEC

SEQ ID NO: 41189 - protein, 7 aa, synthetic construct
GGESVRW

SEQ ID NO: 41190 - protein, 7 aa, synthetic construct
FFTGVLA

SEQ ID NO: 41191 - protein, 7 aa, synthetic construct
WNPMCKA

SEQ ID NO: 41192 - protein, 7 aa, synthetic construct
TKEQGDC

SEQ ID NO: 41193 - protein, 7 aa, synthetic construct
YWSQVIE

SEQ ID NO: 41194 - protein, 7 aa, synthetic construct
LPKDKCP

SEQ ID NO: 41195 - protein, 7 aa, synthetic construct
GGGSSKW

SEQ ID NO: 41196 - protein, 7 aa, synthetic construct
KDDYVPW

SEQ ID NO: 41197 - protein, 7 aa, synthetic construct
VPMLGAG

SEQ ID NO: 41198 - protein, 7 aa, synthetic construct
YFSGRED

SEQ ID NO: 41199 - protein, 7 aa, synthetic construct
YHALNKP

SEQ ID NO: 41200 - protein, 7 aa, synthetic construct
GDEYLMF

SEQ ID NO: 41201 - protein, 7 aa, synthetic construct
DLRTAAW

SEQ ID NO: 41202 - protein, 7 aa, synthetic construct
GGTGSSW

SEQ ID NO: 41203 - protein, 7 aa, synthetic construct
YARNSDN

SEQ ID NO: 41204 - protein, 7 aa, synthetic construct
YFSGREE

SEQ ID NO: 41205 - protein, 7 aa, synthetic construct
RGDSSRW

SEQ ID NO: 41206 - protein, 7 aa, synthetic construct
CKKGSLE

SEQ ID NO: 41207 - protein, 7 aa, synthetic construct
CTSKSGH

SEQ ID NO: 41208 - protein, 7 aa, synthetic construct
SCKPCPG

SEQ ID NO: 41209 - protein, 7 aa, synthetic construct
IDAANKC

SEQ ID NO: 41210 - protein, 7 aa, synthetic construct
YWNGIQA

SEQ ID NO: 41211 - protein, 7 aa, synthetic construct
YSRLSPE

SEQ ID NO: 41212 - protein, 7 aa, synthetic construct
REDHTSW

SEQ ID NO: 41213 - protein, 7 aa, synthetic construct
QKTNTGC

SEQ ID NO: 41214 - protein, 7 aa, synthetic construct
CTSKTGE

SEQ ID NO: 41215 - protein, 7 aa, synthetic construct
VKRSDEC

SEQ ID NO: 41216 - protein, 7 aa, synthetic construct
RLMDSYP

SEQ ID NO: 41217 - protein, 7 aa, synthetic construct
CLKMCPP

SEQ ID NO: 41218 - protein, 7 aa, synthetic construct
CKAQTPG

SEQ ID NO: 41219 - protein, 7 aa, synthetic construct
CKPDSRW

SEQ ID NO: 41220 - protein, 7 aa, synthetic construct
CKPMTID

SEQ ID NO: 41221 - protein, 7 aa, synthetic construct
YGNQREC

SEQ ID NO: 41222 - protein, 7 aa, synthetic construct
RDGSCKA

SEQ ID NO: 41223 - protein, 7 aa, synthetic construct
YFQGIHE

SEQ ID NO: 41224 - protein, 7 aa, synthetic construct
GKDKADC

SEQ ID NO: 41225 - protein, 7 aa, synthetic construct
QSGKNEC

SEQ ID NO: 41226 - protein, 7 aa, synthetic construct
NAKNEGC

SEQ ID NO: 41227 - protein, 7 aa, synthetic construct
CKPICAG

SEQ ID NO: 41228 - protein, 7 aa, synthetic construct
VPDYVAY

SEQ ID NO: 41229 - protein, 7 aa, synthetic construct
IPEVCCG

SEQ ID NO: 41230 - protein, 7 aa, synthetic construct
SMDSRSW

SEQ ID NO: 41231 - protein, 7 aa, synthetic construct
IKDQSGC

SEQ ID NO: 41232 - protein, 7 aa, synthetic construct
QQPKETC

SEQ ID NO: 41233 - protein, 7 aa, synthetic construct
YVKVCKD

SEQ ID NO: 41234 - protein, 7 aa, synthetic construct
YTKLDMN

SEQ ID NO: 41235 - protein, 7 aa, synthetic construct
CKPTSLN

SEQ ID NO: 41236 - protein, 7 aa, synthetic construct
GCGTKMG

SEQ ID NO: 41237 - protein, 7 aa, synthetic construct
CKALSRE

SEQ ID NO: 41238 - protein, 7 aa, synthetic construct
LWKECKP

SEQ ID NO: 41239 - protein, 7 aa, synthetic construct
YTPGCKE

SEQ ID NO: 41240 - protein, 7 aa, synthetic construct
YWGGITE

SEQ ID NO: 41241 - protein, 7 aa, synthetic construct
RSDFIPF

SEQ ID NO: 41242 - protein, 7 aa, synthetic construct
PKGPCDA

SEQ ID NO: 41243 - protein, 7 aa, synthetic construct
CPPKKTD

SEQ ID NO: 41244 - protein, 7 aa, synthetic construct
WFSGQRE

SEQ ID NO: 41245 - protein, 7 aa, synthetic construct
CKPGTVM

SEQ ID NO: 41246 - protein, 7 aa, synthetic construct
VNDFKIF

SEQ ID NO: 41247 - protein, 7 aa, synthetic construct
CKTFSKE

SEQ ID NO: 41248 - protein, 7 aa, synthetic construct
CKKNGME

SEQ ID NO: 41249 - protein, 7 aa, synthetic construct
LPRPCSE

SEQ ID NO: 41250 - protein, 7 aa, synthetic construct
AHCKGPE

SEQ ID NO: 41251 - protein, 7 aa, synthetic construct
REPTCPR

SEQ ID NO: 41252 - protein, 7 aa, synthetic construct
YMPGCKE

SEQ ID NO: 41253 - protein, 7 aa, synthetic construct
VPEKCPG

SEQ ID NO: 41254 - protein, 7 aa, synthetic construct
GEPGVRW

SEQ ID NO: 41255 - protein, 7 aa, synthetic construct
CKVISPP

SEQ ID NO: 41256 - protein, 7 aa, synthetic construct
RLESSLW

SEQ ID NO: 41257 - protein, 7 aa, synthetic construct
RTPTCAA

SEQ ID NO: 41258 - protein, 7 aa, synthetic construct
YFSGTIT

SEQ ID NO: 41259 - protein, 7 aa, synthetic construct
LWDGTEA

SEQ ID NO: 41260 - protein, 7 aa, synthetic construct
HPETKCP

SEQ ID NO: 41261 - protein, 7 aa, synthetic construct
CISKTGH

SEQ ID NO: 41262 - protein, 7 aa, synthetic construct
ISEFKIY

SEQ ID NO: 41263 - protein, 7 aa, synthetic construct
WWHGRPE

SEQ ID NO: 41264 - protein, 7 aa, synthetic construct
RDDFISF

SEQ ID NO: 41265 - protein, 7 aa, synthetic construct
VSTHICA

SEQ ID NO: 41266 - protein, 7 aa, synthetic construct
CRPEAKS

SEQ ID NO: 41267 - protein, 7 aa, synthetic construct
YGKVGCQ

SEQ ID NO: 41268 - protein, 7 aa, synthetic construct
CKKQLQD

SEQ ID NO: 41269 - protein, 7 aa, synthetic construct
CKPGTLD

SEQ ID NO: 41270 - protein, 7 aa, synthetic construct
CKPRSGE

SEQ ID NO: 41271 - protein, 7 aa, synthetic construct
CTSKTGP

SEQ ID NO: 41272 - protein, 7 aa, synthetic construct
YFQGVIA

SEQ ID NO: 41273 - protein, 7 aa, synthetic construct
YEPPCKE

SEQ ID NO: 41274 - protein, 7 aa, synthetic construct
YFQGIPL

SEQ ID NO: 41275 - protein, 7 aa, synthetic construct
YFQGVRD

SEQ ID NO: 41276 - protein, 7 aa, synthetic construct
CTPDYRE

SEQ ID NO: 41277 - protein, 7 aa, synthetic construct
RSEYTVY

SEQ ID NO: 41278 - protein, 7 aa, synthetic construct
FFSGTHE

SEQ ID NO: 41279 - protein, 7 aa, synthetic construct
KNEYVKW

SEQ ID NO: 41280 - protein, 7 aa, synthetic construct
CNKPMVA

SEQ ID NO: 41281 - protein, 7 aa, synthetic construct
FWSGTID

SEQ ID NO: 41282 - protein, 7 aa, synthetic construct
CKMDNTP

SEQ ID NO: 41283 - protein, 7 aa, synthetic construct
YKEPCIS

SEQ ID NO: 41284 - protein, 7 aa, synthetic construct
YFSGTQR

SEQ ID NO: 41285 - protein, 7 aa, synthetic construct
LCRPMSE

SEQ ID NO: 41286 - protein, 7 aa, synthetic construct
RTPTLYP

SEQ ID NO: 41287 - protein, 7 aa, synthetic construct
YFTGSMD

SEQ ID NO: 41288 - protein, 7 aa, synthetic construct
YFTGMQS

SEQ ID NO: 41289 - protein, 7 aa, synthetic construct
YEPGCKQ

SEQ ID NO: 41290 - protein, 7 aa, synthetic construct
KDDYKTW

SEQ ID NO: 41291 - protein, 7 aa, synthetic construct
FFSGQHE

SEQ ID NO: 41292 - protein, 7 aa, synthetic construct
NMSEAKW

SEQ ID NO: 41293 - protein, 7 aa, synthetic construct
QTKSEQC

SEQ ID NO: 41294 - protein, 7 aa, synthetic construct
SMGDRSW

SEQ ID NO: 41295 - protein, 7 aa, synthetic construct
RLEASVW

SEQ ID NO: 41296 - protein, 7 aa, synthetic construct
CKPGVPP

SEQ ID NO: 41297 - protein, 7 aa, synthetic construct
RTAGVFP

SEQ ID NO: 41298 - protein, 7 aa, synthetic construct
CETKKPS

SEQ ID NO: 41299 - protein, 7 aa, synthetic construct
WWTGTLE

SEQ ID NO: 41300 - protein, 7 aa, synthetic construct
CDKTCSP

SEQ ID NO: 41301 - protein, 7 aa, synthetic construct
YFMGIPA

SEQ ID NO: 41302 - protein, 7 aa, synthetic construct
YWSGTSS

SEQ ID NO: 41303 - protein, 7 aa, synthetic construct
DRRGCCA

SEQ ID NO: 41304 - protein, 7 aa, synthetic construct
CGGIKPP

SEQ ID NO: 41305 - protein, 7 aa, synthetic construct
SDGHSKW

SEQ ID NO: 41306 - protein, 7 aa, synthetic construct
KNGTSSW

SEQ ID NO: 41307 - protein, 7 aa, synthetic construct
YLKSQYY

SEQ ID NO: 41308 - protein, 7 aa, synthetic construct
DGYSREW

SEQ ID NO: 41309 - protein, 7 aa, synthetic construct
TDGTVKC

SEQ ID NO: 41310 - protein, 7 aa, synthetic construct
REDWSTY

SEQ ID NO: 41311 - protein, 7 aa, synthetic construct
ITSFNGI

SEQ ID NO: 41312 - protein, 7 aa, synthetic construct
YRSTNGV

SEQ ID NO: 41313 - protein, 7 aa, synthetic construct
YFAGKPD

SEQ ID NO: 41314 - protein, 7 aa, synthetic construct
CKLQPKP

SEQ ID NO: 41315 - protein, 7 aa, synthetic construct
MWDGTFA

SEQ ID NO: 41316 - protein, 7 aa, synthetic construct
YFTGLVA

SEQ ID NO: 41317 - protein, 7 aa, synthetic construct
GSEFDHW

SEQ ID NO: 41318 - protein, 7 aa, synthetic construct
YWSGQVS

SEQ ID NO: 41319 - protein, 7 aa, synthetic construct
KNDYNTW

SEQ ID NO: 41320 - protein, 7 aa, synthetic construct
WFSGISE

SEQ ID NO: 41321 - protein, 7 aa, synthetic construct
CSKENRE

SEQ ID NO: 41322 - protein, 7 aa, synthetic construct
LPDSVRW

SEQ ID NO: 41323 - protein, 7 aa, synthetic construct
FFTGRTD

SEQ ID NO: 41324 - protein, 7 aa, synthetic construct
CKMNCMG

SEQ ID NO: 41325 - protein, 7 aa, synthetic construct
RDEFTLW

SEQ ID NO: 41326 - protein, 7 aa, synthetic construct
CKSLKTE

SEQ ID NO: 41327 - protein, 7 aa, synthetic construct
CNKPMDA

SEQ ID NO: 41328 - protein, 7 aa, synthetic construct
KQNATGC

SEQ ID NO: 41329 - protein, 7 aa, synthetic construct
CLPRCVA

SEQ ID NO: 41330 - protein, 7 aa, synthetic construct
RDEYQTW

SEQ ID NO: 41331 - protein, 7 aa, synthetic construct
GCKPQMG

SEQ ID NO: 41332 - protein, 7 aa, synthetic construct
LHRLTEG

SEQ ID NO: 41333 - protein, 7 aa, synthetic construct
YYTGTID

SEQ ID NO: 41334 - protein, 7 aa, synthetic construct
CKIPSKE

SEQ ID NO: 41335 - protein, 7 aa, synthetic construct
ISLTQSF

SEQ ID NO: 41336 - protein, 7 aa, synthetic construct
CLPLCGP

SEQ ID NO: 41337 - protein, 7 aa, synthetic construct
YWSEVKE

SEQ ID NO: 41338 - protein, 7 aa, synthetic construct
LMKSCLP

SEQ ID NO: 41339 - protein, 7 aa, synthetic construct
CQDDKKG

SEQ ID NO: 41340 - protein, 7 aa, synthetic construct
RDDWSTW

SEQ ID NO: 41341 - protein, 7 aa, synthetic construct
CAKPMTA

SEQ ID NO: 41342 - protein, 7 aa, synthetic construct
GGGWTMG

SEQ ID NO: 41343 - protein, 7 aa, synthetic construct
KASNEAC

SEQ ID NO: 41344 - protein, 7 aa, synthetic construct
FAKSKAN

SEQ ID NO: 41345 - protein, 7 aa, synthetic construct
LVKSQPC

SEQ ID NO: 41346 - protein, 7 aa, synthetic construct
CNKPMGA

SEQ ID NO: 41347 - protein, 7 aa, synthetic construct
WVKSQPL

SEQ ID NO: 41348 - protein, 7 aa, synthetic construct
VPEGCHG

SEQ ID NO: 41349 - protein, 7 aa, synthetic construct
YFAGRND

SEQ ID NO: 41350 - protein, 7 aa, synthetic construct
KDSYHIF

SEQ ID NO: 41351 - protein, 7 aa, synthetic construct
TAGMKCI

SEQ ID NO: 41352 - protein, 7 aa, synthetic construct
SQETCKF

SEQ ID NO: 41353 - protein, 7 aa, synthetic construct
IPETRCA

SEQ ID NO: 41354 - protein, 7 aa, synthetic construct
CTSGTGH

SEQ ID NO: 41355 - protein, 7 aa, synthetic construct
CDGSSKA

SEQ ID NO: 41356 - protein, 7 aa, synthetic construct
VKKYGPD

SEQ ID NO: 41357 - protein, 7 aa, synthetic construct
YKSQQDC

SEQ ID NO: 41358 - protein, 7 aa, synthetic construct
IGGKCPF

SEQ ID NO: 41359 - protein, 7 aa, synthetic construct
CNKPMTY

SEQ ID NO: 41360 - protein, 7 aa, synthetic construct
RDEASAW

SEQ ID NO: 41361 - protein, 7 aa, synthetic construct
YTPMCKA

SEQ ID NO: 41362 - protein, 7 aa, synthetic construct
CNLPMTA

SEQ ID NO: 41363 - protein, 7 aa, synthetic construct
TKESVPC

SEQ ID NO: 41364 - protein, 7 aa, synthetic construct
TSTDNKC

SEQ ID NO: 41365 - protein, 7 aa, synthetic construct
QKHEAEC

SEQ ID NO: 41366 - protein, 7 aa, synthetic construct
CAKCPRP

SEQ ID NO: 41367 - protein, 7 aa, synthetic construct
EDGTSKW

SEQ ID NO: 41368 - protein, 7 aa, synthetic construct
CNKPMTP

SEQ ID NO: 41369 - protein, 7 aa, synthetic construct
KKDITCA

SEQ ID NO: 41370 - protein, 7 aa, synthetic construct
LTKPCLT

SEQ ID NO: 41371 - protein, 7 aa, synthetic construct
GNGGSPC

SEQ ID NO: 41372 - protein, 7 aa, synthetic construct
CNKPMQA

SEQ ID NO: 41373 - protein, 7 aa, synthetic construct
YAKCNSN

SEQ ID NO: 41374 - protein, 7 aa, synthetic construct
CKPSKLE

SEQ ID NO: 41375 - protein, 7 aa, synthetic construct
IKSNGDC

SEQ ID NO: 41376 - protein, 7 aa, synthetic construct
CKDKPQV

SEQ ID NO: 41377 - protein, 7 aa, synthetic construct
MTGSSCL

SEQ ID NO: 41378 - protein, 7 aa, synthetic construct
RGEDAYP

SEQ ID NO: 41379 - protein, 7 aa, synthetic construct
CKPPMVS

SEQ ID NO: 41380 - protein, 7 aa, synthetic construct
VPECMKP

SEQ ID NO: 41381 - protein, 7 aa, synthetic construct
MHGTSCL

SEQ ID NO: 41382 - protein, 7 aa, synthetic construct
YWTGEKE

SEQ ID NO: 41383 - protein, 7 aa, synthetic construct
YGKGETC

SEQ ID NO: 41384 - protein, 7 aa, synthetic construct
GSPGNSW

SEQ ID NO: 41385 - protein, 7 aa, synthetic construct
CKPCPLR

SEQ ID NO: 41386 - protein, 7 aa, synthetic construct
REGSSYW

SEQ ID NO: 41387 - protein, 7 aa, synthetic construct
FFSGRYD

SEQ ID NO: 41388 - protein, 7 aa, synthetic construct
CPSKTGH

SEQ ID NO: 41389 - protein, 7 aa, synthetic construct
GIETSRW

SEQ ID NO: 41390 - protein, 7 aa, synthetic construct
CNKPMSA

SEQ ID NO: 41391 - protein, 7 aa, synthetic construct
LLSDRVW

SEQ ID NO: 41392 - protein, 7 aa, synthetic construct
WTQMCKA

SEQ ID NO: 41393 - protein, 7 aa, synthetic construct
YWSHIKD

SEQ ID NO: 41394 - protein, 7 aa, synthetic construct
MTGTSCA

SEQ ID NO: 41395 - protein, 7 aa, synthetic construct
RDELVFP

SEQ ID NO: 41396 - protein, 7 aa, synthetic construct
VAQGCKP

SEQ ID NO: 41397 - protein, 7 aa, synthetic construct
TQESNKC

SEQ ID NO: 41398 - protein, 7 aa, synthetic construct
CAITPCG

SEQ ID NO: 41399 - protein, 7 aa, synthetic construct
RDAVSSW

SEQ ID NO: 41400 - protein, 7 aa, synthetic construct
RTEFHSF

SEQ ID NO: 41401 - protein, 7 aa, synthetic construct
RDNGVRW

SEQ ID NO: 41402 - protein, 7 aa, synthetic construct
VLSDVKW

SEQ ID NO: 41403 - protein, 7 aa, synthetic construct
FKKMNYN

SEQ ID NO: 41404 - protein, 7 aa, synthetic construct
CDGSWKA

SEQ ID NO: 41405 - protein, 7 aa, synthetic construct
CEGKKEA

SEQ ID NO: 41406 - protein, 7 aa, synthetic construct
KNDHVKW

SEQ ID NO: 41407 - protein, 7 aa, synthetic construct
YYQGIRA

SEQ ID NO: 41408 - protein, 7 aa, synthetic construct
KQDSGQC

SEQ ID NO: 41409 - protein, 7 aa, synthetic construct
VDEFRHF

SEQ ID NO: 41410 - protein, 7 aa, synthetic construct
EEDWSKW

SEQ ID NO: 41411 - protein, 7 aa, synthetic construct
CNGAGPS

SEQ ID NO: 41412 - protein, 7 aa, synthetic construct
YEHGCKE

SEQ ID NO: 41413 - protein, 7 aa, synthetic construct
ITEQKNC

SEQ ID NO: 41414 - protein, 7 aa, synthetic construct
YYSGMRD

SEQ ID NO: 41415 - protein, 7 aa, synthetic construct
PGPERKW

SEQ ID NO: 41416 - protein, 7 aa, synthetic construct
VCKPCLT

SEQ ID NO: 41417 - protein, 7 aa, synthetic construct
VGGTCKY

SEQ ID NO: 41418 - protein, 7 aa, synthetic construct
YFSGLVS

SEQ ID NO: 41419 - protein, 7 aa, synthetic construct
GGGTTRW

SEQ ID NO: 41420 - protein, 7 aa, synthetic construct
CAPVYRE

SEQ ID NO: 41421 - protein, 7 aa, synthetic construct
TKQNGNC

SEQ ID NO: 41422 - protein, 7 aa, synthetic construct
PYSRSIE

SEQ ID NO: 41423 - protein, 7 aa, synthetic construct
GVGGCKP

SEQ ID NO: 41424 - protein, 7 aa, synthetic construct
YEPGCKH

SEQ ID NO: 41425 - protein, 7 aa, synthetic construct
PAPGCMK

SEQ ID NO: 41426 - protein, 7 aa, synthetic construct
GSGTSVW

SEQ ID NO: 41427 - protein, 7 aa, synthetic construct
YWSGQHE

SEQ ID NO: 41428 - protein, 7 aa, synthetic construct
FFSGMRD

SEQ ID NO: 41429 - protein, 7 aa, synthetic construct
CKTECVA

SEQ ID NO: 41430 - protein, 7 aa, synthetic construct
CTSETGH

SEQ ID NO: 41431 - protein, 7 aa, synthetic construct
MGDSSKC

SEQ ID NO: 41432 - protein, 7 aa, synthetic construct
CLPGCLP

SEQ ID NO: 41433 - protein, 7 aa, synthetic construct
WTPMCKG

SEQ ID NO: 41434 - protein, 7 aa, synthetic construct
RDGGSSW

SEQ ID NO: 41435 - protein, 7 aa, synthetic construct
IDEWKGW

SEQ ID NO: 41436 - protein, 7 aa, synthetic construct
YWSGIHN

SEQ ID NO: 41437 - protein, 7 aa, synthetic construct
RQEGVRW

SEQ ID NO: 41438 - protein, 7 aa, synthetic construct
YWQGMRE

SEQ ID NO: 41439 - protein, 7 aa, synthetic construct
GGETSLW

SEQ ID NO: 41440 - protein, 7 aa, synthetic construct
YFAGVLS

SEQ ID NO: 41441 - protein, 7 aa, synthetic construct
GCGTKGG

SEQ ID NO: 41442 - protein, 7 aa, synthetic construct
GGPTSAW

SEQ ID NO: 41443 - protein, 7 aa, synthetic construct
KNGYSSY

SEQ ID NO: 41444 - protein, 7 aa, synthetic construct
VSTHCSA

SEQ ID NO: 41445 - protein, 7 aa, synthetic construct
CYSKTGH

SEQ ID NO: 41446 - protein, 7 aa, synthetic construct
YWSSVRD

SEQ ID NO: 41447 - protein, 7 aa, synthetic construct
LFKECGG

SEQ ID NO: 41448 - protein, 7 aa, synthetic construct
FFSGIVG

SEQ ID NO: 41449 - protein, 7 aa, synthetic construct
YFTGSRS

SEQ ID NO: 41450 - protein, 7 aa, synthetic construct
IGMKGWD

SEQ ID NO: 41451 - protein, 7 aa, synthetic construct
EMESVRW

SEQ ID NO: 41452 - protein, 7 aa, synthetic construct
CDGSAKA

SEQ ID NO: 41453 - protein, 7 aa, synthetic construct
RGGQSTW

SEQ ID NO: 41454 - protein, 7 aa, synthetic construct
LWSGVGP

SEQ ID NO: 41455 - protein, 7 aa, synthetic construct
GGETSVW

SEQ ID NO: 41456 - protein, 7 aa, synthetic construct
YFSGRSL

SEQ ID NO: 41457 - protein, 7 aa, synthetic construct
GCDFRPE

SEQ ID NO: 41458 - protein, 7 aa, synthetic construct
RSEFTPF

SEQ ID NO: 41459 - protein, 7 aa, synthetic construct
YDGGKPC

SEQ ID NO: 41460 - protein, 7 aa, synthetic construct
YWSKVAD

SEQ ID NO: 41461 - protein, 7 aa, synthetic construct
RTYDTVV

SEQ ID NO: 41462 - protein, 7 aa, synthetic construct
KTGNEGC

SEQ ID NO: 41463 - protein, 7 aa, synthetic construct
NWARSLE

SEQ ID NO: 41464 - protein, 7 aa, synthetic construct
VCMPQKP

SEQ ID NO: 41465 - protein, 7 aa, synthetic construct
KNGTSAW

SEQ ID NO: 41466 - protein, 7 aa, synthetic construct
RNGASSW

SEQ ID NO: 41467 - protein, 7 aa, synthetic construct
RSEFTSF

SEQ ID NO: 41468 - protein, 7 aa, synthetic construct
CKVPKMP

SEQ ID NO: 41469 - protein, 7 aa, synthetic construct
WFSGRHA

SEQ ID NO: 41470 - protein, 7 aa, synthetic construct
GVNQVRW

SEQ ID NO: 41471 - protein, 7 aa, synthetic construct
CRVEKPP

SEQ ID NO: 41472 - protein, 7 aa, synthetic construct
RGEGVRW

SEQ ID NO: 41473 - protein, 7 aa, synthetic construct
TREGDPP

SEQ ID NO: 41474 - protein, 7 aa, synthetic construct
YFSGVLT

SEQ ID NO: 41475 - protein, 7 aa, synthetic construct
CTTKTGH

SEQ ID NO: 41476 - protein, 7 aa, synthetic construct
RGEFVSW

SEQ ID NO: 41477 - protein, 7 aa, synthetic construct
VEPGCKE

SEQ ID NO: 41478 - protein, 7 aa, synthetic construct
KDGSSYW

SEQ ID NO: 41479 - protein, 7 aa, synthetic construct
KDEFQTY

SEQ ID NO: 41480 - protein, 7 aa, synthetic construct
PHPKCPF

SEQ ID NO: 41481 - protein, 7 aa, synthetic construct
GGEFVHW

SEQ ID NO: 41482 - protein, 7 aa, synthetic construct
GSEFITF

SEQ ID NO: 41483 - protein, 7 aa, synthetic construct
CNSKTGH

SEQ ID NO: 41484 - protein, 7 aa, synthetic construct
YHRNSDN

SEQ ID NO: 41485 - protein, 7 aa, synthetic construct
DLNSRGW

SEQ ID NO: 41486 - protein, 7 aa, synthetic construct
RDAFVSY

SEQ ID NO: 41487 - protein, 7 aa, synthetic construct
GAGTSHW

SEQ ID NO: 41488 - protein, 7 aa, synthetic construct
YVRSQDF

SEQ ID NO: 41489 - protein, 7 aa, synthetic construct
RESTNGR

SEQ ID NO: 41490 - protein, 7 aa, synthetic construct
REETRYW

SEQ ID NO: 41491 - protein, 7 aa, synthetic construct
CGKPMTA

SEQ ID NO: 41492 - protein, 7 aa, synthetic construct
YYSGTRA

SEQ ID NO: 41493 - protein, 7 aa, synthetic construct
SSPGVRW

SEQ ID NO: 41494 - protein, 7 aa, synthetic construct
YYTGYKE

SEQ ID NO: 41495 - protein, 7 aa, synthetic construct
VMSDNGI

SEQ ID NO: 41496 - protein, 7 aa, synthetic construct
RGEFTVW

SEQ ID NO: 41497 - protein, 7 aa, synthetic construct
RMEAVKW

SEQ ID NO: 41498 - protein, 7 aa, synthetic construct
YIKSDTG

SEQ ID NO: 41499 - protein, 7 aa, synthetic construct
YYSGVRN

SEQ ID NO: 41500 - protein, 7 aa, synthetic construct
LWTGVGP

SEQ ID NO: 41501 - protein, 7 aa, synthetic construct
QWARSLE

SEQ ID NO: 41502 - protein, 7 aa, synthetic construct
GVGTSRW

SEQ ID NO: 41503 - protein, 7 aa, synthetic construct
YWSGERE

SEQ ID NO: 41504 - protein, 7 aa, synthetic construct
CNKPMTQ

SEQ ID NO: 41505 - protein, 7 aa, synthetic construct
GGGTSTW

SEQ ID NO: 41506 - protein, 7 aa, synthetic construct
KDGYTTW

SEQ ID NO: 41507 - protein, 7 aa, synthetic construct
RMSTNGI

SEQ ID NO: 41508 - protein, 7 aa, synthetic construct
QRDGTPA

SEQ ID NO: 41509 - protein, 7 aa, synthetic construct
RGAGVYP

SEQ ID NO: 41510 - protein, 7 aa, synthetic construct
YFAGVKV

SEQ ID NO: 41511 - protein, 7 aa, synthetic construct
YYSGQKS

SEQ ID NO: 41512 - protein, 7 aa, synthetic construct
FMDGTPA

SEQ ID NO: 41513 - protein, 7 aa, synthetic construct
LRNGTGP

SEQ ID NO: 41514 - protein, 7 aa, synthetic construct
LWSGEAP

SEQ ID NO: 41515 - protein, 7 aa, synthetic construct
NWARSVE

SEQ ID NO: 41516 - protein, 7 aa, synthetic construct
GCRPCPT

SEQ ID NO: 41517 - protein, 7 aa, synthetic construct
TRWGENA

SEQ ID NO: 41518 - protein, 7 aa, synthetic construct
RTVHTYP

SEQ ID NO: 41519 - protein, 7 aa, synthetic construct
SDGVSYW

SEQ ID NO: 41520 - protein, 7 aa, synthetic construct
WTSDNGI

SEQ ID NO: 41521 - protein, 7 aa, synthetic construct
GGPGTRW

SEQ ID NO: 41522 - protein, 7 aa, synthetic construct
WHSTNGV

SEQ ID NO: 41523 - protein, 7 aa, synthetic construct
GGVSSTW

SEQ ID NO: 41524 - protein, 7 aa, synthetic construct
KDDFQSF

SEQ ID NO: 41525 - protein, 7 aa, synthetic construct
YYSGTRS

SEQ ID NO: 41526 - protein, 7 aa, synthetic construct
YIKSQSY

SEQ ID NO: 41527 - protein, 7 aa, synthetic construct
IDEWQSY

SEQ ID NO: 41528 - protein, 7 aa, synthetic construct
GGEYVTW

SEQ ID NO: 41529 - protein, 7 aa, synthetic construct
PGGTSTW

SEQ ID NO: 41530 - protein, 7 aa, synthetic construct
CKTEARG

SEQ ID NO: 41531 - protein, 7 aa, synthetic construct
YFAGVME

SEQ ID NO: 41532 - protein, 7 aa, synthetic construct
CKPGMRE

SEQ ID NO: 41533 - protein, 7 aa, synthetic construct
RLESTVW

SEQ ID NO: 41534 - protein, 7 aa, synthetic construct
SMQDRRW

SEQ ID NO: 41535 - protein, 7 aa, synthetic construct
FWSGTHD

SEQ ID NO: 41536 - protein, 7 aa, synthetic construct
GGGTSLW

SEQ ID NO: 41537 - protein, 7 aa, synthetic construct
DYESRKW

SEQ ID NO: 41538 - protein, 7 aa, synthetic construct
CKRVQIE

SEQ ID NO: 41539 - protein, 7 aa, synthetic construct
KEDWTPW

SEQ ID NO: 41540 - protein, 7 aa, synthetic construct
EMESVKW

SEQ ID NO: 41541 - protein, 7 aa, synthetic construct
TRYGENA

SEQ ID NO: 41542 - protein, 7 aa, synthetic construct
RSETSYW

SEQ ID NO: 41543 - protein, 7 aa, synthetic construct
RSEFTPY

SEQ ID NO: 41544 - protein, 7 aa, synthetic construct
RSEFSGF

SEQ ID NO: 41545 - protein, 7 aa, synthetic construct
SMQDRAW

SEQ ID NO: 41546 - protein, 7 aa, synthetic construct
RGGEGEC

SEQ ID NO: 41547 - protein, 7 aa, synthetic construct
RGEFLSY

SEQ ID NO: 41548 - protein, 7 aa, synthetic construct
YWSGLPD

SEQ ID NO: 41549 - protein, 7 aa, synthetic construct
VSTHACA

SEQ ID NO: 41550 - protein, 7 aa, synthetic construct
REAVSSW

SEQ ID NO: 41551 - protein, 7 aa, synthetic construct
FWHGTIE

SEQ ID NO: 41552 - protein, 7 aa, synthetic construct
NLESHKW

SEQ ID NO: 41553 - protein, 7 aa, synthetic construct
KDDWNSY

SEQ ID NO: 41554 - protein, 7 aa, synthetic construct
TWEGTNA

SEQ ID NO: 41555 - protein, 7 aa, synthetic construct
TNEFKPW

SEQ ID NO: 41556 - protein, 7 aa, synthetic construct
YFTGMVV

SEQ ID NO: 41557 - protein, 7 aa, synthetic construct
GGISSTW

SEQ ID NO: 41558 - protein, 7 aa, synthetic construct
DWARSPM

SEQ ID NO: 41559 - protein, 7 aa, synthetic construct
CTSKTPH

SEQ ID NO: 41560 - protein, 7 aa, synthetic construct
RGEFHSY

SEQ ID NO: 41561 - protein, 7 aa, synthetic construct
GVEMVRW

SEQ ID NO: 41562 - protein, 7 aa, synthetic construct
IPSSVKW

SEQ ID NO: 41563 - protein, 7 aa, synthetic construct
LRDGSPP

SEQ ID NO: 41564 - protein, 7 aa, synthetic construct
RSEFHPF

SEQ ID NO: 41565 - protein, 7 aa, synthetic construct
TRDGTNA

SEQ ID NO: 41566 - protein, 7 aa, synthetic construct
WLKSQSY

SEQ ID NO: 41567 - protein, 7 aa, synthetic construct
GANTSRW

SEQ ID NO: 41568 - protein, 7 aa, synthetic construct
TWNGDNA

SEQ ID NO: 41569 - protein, 7 aa, synthetic construct
TWTGDIP

SEQ ID NO: 41570 - protein, 7 aa, synthetic construct
NLASAGW

SEQ ID NO: 41571 - protein, 7 aa, synthetic construct
KSDYMSF

SEQ ID NO: 41572 - protein, 7 aa, synthetic construct
AYARSPL

SEQ ID NO: 41573 - protein, 7 aa, synthetic construct
GGPTCKF

SEQ ID NO: 41574 - protein, 7 aa, synthetic construct
GSGNSIW

SEQ ID NO: 41575 - protein, 7 aa, synthetic construct
VAQKGCG

SEQ ID NO: 41576 - protein, 7 aa, synthetic construct
YYSGRLS

SEQ ID NO: 41577 - protein, 7 aa, synthetic construct
VSDFTGY

SEQ ID NO: 41578 - protein, 7 aa, synthetic construct
LWSGMGP

SEQ ID NO: 41579 - protein, 7 aa, synthetic construct
QMASQAW

SEQ ID NO: 41580 - protein, 7 aa, synthetic construct
FSRMNYN

SEQ ID NO: 41581 - protein, 7 aa, synthetic construct
SGYDRGW

SEQ ID NO: 41582 - protein, 7 aa, synthetic construct
FWGGIKE

SEQ ID NO: 41583 - protein, 7 aa, synthetic construct
TWDGMQA

SEQ ID NO: 41584 - protein, 7 aa, synthetic construct
APYDRGW

SEQ ID NO: 41585 - protein, 7 aa, synthetic construct
IDEFRSW

SEQ ID NO: 41586 - protein, 7 aa, synthetic construct
RENSVYW

SEQ ID NO: 41587 - protein, 7 aa, synthetic construct
RGDSSYW

SEQ ID NO: 41588 - protein, 7 aa, synthetic construct
MYAFSKE

SEQ ID NO: 41589 - protein, 7 aa, synthetic construct
WPFGMDA

SEQ ID NO: 41590 - protein, 7 aa, synthetic construct
KFDGTPS

SEQ ID NO: 41591 - protein, 7 aa, synthetic construct
RGEFTSY

SEQ ID NO: 41592 - protein, 7 aa, synthetic construct
TWEGTAA

SEQ ID NO: 41593 - protein, 7 aa, synthetic construct
FWTGIPD

SEQ ID NO: 41594 - protein, 7 aa, synthetic construct
KYDGTSA

SEQ ID NO: 41595 - protein, 7 aa, synthetic construct
CKMSCAE

SEQ ID NO: 41596 - protein, 7 aa, synthetic construct
CSKRPCG

SEQ ID NO: 41597 - protein, 7 aa, synthetic construct
RDETSFW

SEQ ID NO: 41598 - protein, 7 aa, synthetic construct
TVWGDPA

SEQ ID NO: 41599 - protein, 7 aa, synthetic construct
RGESVRW

SEQ ID NO: 41600 - protein, 7 aa, synthetic construct
FWSGQRD

SEQ ID NO: 41601 - protein, 7 aa, synthetic construct
DMGGYDW

SEQ ID NO: 41602 - protein, 7 aa, synthetic construct
VDDFKVF

SEQ ID NO: 41603 - protein, 7 aa, synthetic construct
IPERCPK

SEQ ID NO: 41604 - protein, 7 aa, synthetic construct
RMDSVSW

SEQ ID NO: 41605 - protein, 7 aa, synthetic construct
MLSSNTW

SEQ ID NO: 41606 - protein, 7 aa, synthetic construct
YSRDGCN

SEQ ID NO: 41607 - protein, 7 aa, synthetic construct
RMEDVYW

SEQ ID NO: 41608 - protein, 7 aa, synthetic construct
KWDGTSA

SEQ ID NO: 41609 - protein, 7 aa, synthetic construct
GCGTKYG

SEQ ID NO: 41610 - protein, 7 aa, synthetic construct
RTPTCYG

SEQ ID NO: 41611 - protein, 7 aa, synthetic construct
IPPLYQV

SEQ ID NO: 41612 - protein, 7 aa, synthetic construct
YVKWDSG

SEQ ID NO: 41613 - protein, 7 aa, synthetic construct
TWEGEGP

SEQ ID NO: 41614 - protein, 7 aa, synthetic construct
YFDGTPA

SEQ ID NO: 41615 - protein, 7 aa, synthetic construct
KDEFRAY

SEQ ID NO: 41616 - protein, 7 aa, synthetic construct
YSRFNIN

SEQ ID NO: 41617 - protein, 7 aa, synthetic construct
GSGTAKW

SEQ ID NO: 41618 - protein, 7 aa, synthetic construct
DMGSNTW

SEQ ID NO: 41619 - protein, 7 aa, synthetic construct
YNPGCKE

SEQ ID NO: 41620 - protein, 7 aa, synthetic construct
LFSGMGP

SEQ ID NO: 41621 - protein, 7 aa, synthetic construct
KVEHVRW

SEQ ID NO: 41622 - protein, 7 aa, synthetic construct
RDEFRPW

SEQ ID NO: 41623 - protein, 7 aa, synthetic construct
SMQDRIW

SEQ ID NO: 41624 - protein, 7 aa, synthetic construct
MRDGTIA

SEQ ID NO: 41625 - protein, 7 aa, synthetic construct
YEPGCKP

SEQ ID NO: 41626 - protein, 7 aa, synthetic construct
IPSKCPF

SEQ ID NO: 41627 - protein, 7 aa, synthetic construct
LWSGENA

SEQ ID NO: 41628 - protein, 7 aa, synthetic construct
TRWGDEA

SEQ ID NO: 41629 - protein, 7 aa, synthetic construct
MRDGSNA

SEQ ID NO: 41630 - protein, 7 aa, synthetic construct
RDDFHPF

SEQ ID NO: 41631 - protein, 7 aa, synthetic construct
FGPPTPD

SEQ ID NO: 41632 - protein, 7 aa, synthetic construct
LFDGTYA

SEQ ID NO: 41633 - protein, 7 aa, synthetic construct
FTPMCKA

SEQ ID NO: 41634 - protein, 7 aa, synthetic construct
YWSGQQA

SEQ ID NO: 41635 - protein, 7 aa, synthetic construct
YFAGVVS

SEQ ID NO: 41636 - protein, 7 aa, synthetic construct
KEDFLSW

SEQ ID NO: 41637 - protein, 7 aa, synthetic construct
RLDSANW

SEQ ID NO: 41638 - protein, 7 aa, synthetic construct
EMESTKW

SEQ ID NO: 41639 - protein, 7 aa, synthetic construct
YNAGREC

SEQ ID NO: 41640 - protein, 7 aa, synthetic construct
RDDFRTW

SEQ ID NO: 41641 - protein, 7 aa, synthetic construct
RDEFRGW

SEQ ID NO: 41642 - protein, 7 aa, synthetic construct
FDGASRW

SEQ ID NO: 41643 - protein, 7 aa, synthetic construct
TWDGTPA

SEQ ID NO: 41644 - protein, 7 aa, synthetic construct
KDDYSGY

SEQ ID NO: 41645 - protein, 7 aa, synthetic construct
KSDWTPY

SEQ ID NO: 41646 - protein, 7 aa, synthetic construct
KGDFSTW

SEQ ID NO: 41647 - protein, 7 aa, synthetic construct
RRDGTSA

SEQ ID NO: 41648 - protein, 7 aa, synthetic construct
WDPMCKA

SEQ ID NO: 41649 - protein, 7 aa, synthetic construct
RSEFTAF

SEQ ID NO: 41650 - protein, 7 aa, synthetic construct
REETSSW

SEQ ID NO: 41651 - protein, 7 aa, synthetic construct
LWDGTPR

SEQ ID NO: 41652 - protein, 7 aa, synthetic construct
IMATSTW

SEQ ID NO: 41653 - protein, 7 aa, synthetic construct
TYDGTAA

SEQ ID NO: 41654 - protein, 7 aa, synthetic construct
KDEYMVW

SEQ ID NO: 41655 - protein, 7 aa, synthetic construct
TWEGTPA

SEQ ID NO: 41656 - protein, 7 aa, synthetic construct
QDGYSRW

SEQ ID NO: 41657 - protein, 7 aa, synthetic construct
YFTNQIN

SEQ ID NO: 41658 - protein, 7 aa, synthetic construct
TWSGENA

SEQ ID NO: 41659 - protein, 7 aa, synthetic construct
KFDGTSA

SEQ ID NO: 41660 - protein, 7 aa, synthetic construct
LMDGTNA

SEQ ID NO: 41661 - protein, 7 aa, synthetic construct
LWDGTLR

SEQ ID NO: 41662 - protein, 7 aa, synthetic construct
KDGFSIY

SEQ ID NO: 41663 - protein, 7 aa, synthetic construct
GGESSMW

SEQ ID NO: 41664 - protein, 7 aa, synthetic construct
TKYGDPS

SEQ ID NO: 41665 - protein, 7 aa, synthetic construct
MRDGTTA

SEQ ID NO: 41666 - protein, 7 aa, synthetic construct
MRDGTDA

SEQ ID NO: 41667 - protein, 7 aa, synthetic construct
MRDGTRA

SEQ ID NO: 41668 - protein, 7 aa, synthetic construct
LFDGTIP

SEQ ID NO: 41669 - protein, 7 aa, synthetic construct
LRNGNPA

SEQ ID NO: 41670 - protein, 7 aa, synthetic construct
LRDGTRA

SEQ ID NO: 41671 - protein, 7 aa, synthetic construct
TRFGDPS

SEQ ID NO: 41672 - protein, 7 aa, synthetic construct
MWDGTHA

SEQ ID NO: 41673 - protein, 7 aa, synthetic construct
IPPLFEV

SEQ ID NO: 41674 - protein, 7 aa, synthetic construct
LCKPCLK

SEQ ID NO: 41675 - protein, 7 aa, synthetic construct
LCRPCSY

SEQ ID NO: 41676 - protein, 7 aa, synthetic construct
LFDGTVA

SEQ ID NO: 41677 - protein, 7 aa, synthetic construct
CKSQTCC

SEQ ID NO: 41678 - protein, 7 aa, synthetic construct
CALYLHE

SEQ ID NO: 41679 - protein, 7 aa, synthetic construct
YVKSQKL

SEQ ID NO: 41680 - protein, 7 aa, synthetic construct
CAPYEHE

SEQ ID NO: 41681 - protein, 7 aa, synthetic construct
REEYMPF

SEQ ID NO: 41682 - protein, 7 aa, synthetic construct
LCKPCLF

SEQ ID NO: 41683 - protein, 7 aa, synthetic construct
CAPDPRE

SEQ ID NO: 41684 - protein, 7 aa, synthetic construct
YHKLNPF

SEQ ID NO: 41685 - protein, 7 aa, synthetic construct
EDGSCKA

SEQ ID NO: 41686 - protein, 7 aa, synthetic construct
FSCVTGS

SEQ ID NO: 41687 - protein, 7 aa, synthetic construct
LCKPHLT

SEQ ID NO: 41688 - protein, 7 aa, synthetic construct
CAPQLHE

SEQ ID NO: 41689 - protein, 7 aa, synthetic construct
CKRGAMS

SEQ ID NO: 41690 - protein, 7 aa, synthetic construct
RTYDCIG

SEQ ID NO: 41691 - protein, 7 aa, synthetic construct
RNCEVGP

SEQ ID NO: 41692 - protein, 7 aa, synthetic construct
LCKGCLT

SEQ ID NO: 41693 - protein, 7 aa, synthetic construct
LCRPCSL

SEQ ID NO: 41694 - protein, 7 aa, synthetic construct
KFCNTGS

SEQ ID NO: 41695 - protein, 7 aa, synthetic construct
GRPNCKP

SEQ ID NO: 41696 - protein, 7 aa, synthetic construct
CKGSAEQ

SEQ ID NO: 41697 - protein, 7 aa, synthetic construct
KHDFTCA

SEQ ID NO: 41698 - protein, 7 aa, synthetic construct
LCVPCLT

SEQ ID NO: 41699 - protein, 7 aa, synthetic construct
RECTSPW

SEQ ID NO: 41700 - protein, 7 aa, synthetic construct
YWSGVVI

SEQ ID NO: 41701 - protein, 7 aa, synthetic construct
CRMAPPY

SEQ ID NO: 41702 - protein, 7 aa, synthetic construct
LCKPCLR

SEQ ID NO: 41703 - protein, 7 aa, synthetic construct
CGRSCCP

SEQ ID NO: 41704 - protein, 7 aa, synthetic construct
CKGSYEQ

SEQ ID NO: 41705 - protein, 7 aa, synthetic construct
FAKCNAN

SEQ ID NO: 41706 - protein, 7 aa, synthetic construct
RDEFTPW

SEQ ID NO: 41707 - protein, 7 aa, synthetic construct
FAKCNYN

SEQ ID NO: 41708 - protein, 7 aa, synthetic construct
CNPYLHE

SEQ ID NO: 41709 - protein, 7 aa, synthetic construct
TQIACDR

SEQ ID NO: 41710 - protein, 7 aa, synthetic construct
RCGIPTA

SEQ ID NO: 41711 - protein, 7 aa, synthetic construct
GGGPCCR

SEQ ID NO: 41712 - protein, 7 aa, synthetic construct
WTPHCKA

SEQ ID NO: 41713 - protein, 7 aa, synthetic construct
KDEYTMY

SEQ ID NO: 41714 - protein, 7 aa, synthetic construct
WTPMCKT

SEQ ID NO: 41715 - protein, 7 aa, synthetic construct
YFEGVRW

SEQ ID NO: 41716 - protein, 7 aa, synthetic construct
YEPGCSE

SEQ ID NO: 41717 - protein, 7 aa, synthetic construct
YFTGACD

SEQ ID NO: 41718 - protein, 7 aa, synthetic construct
IDEWLPF

SEQ ID NO: 41719 - protein, 7 aa, synthetic construct
YFTGMCE

SEQ ID NO: 41720 - protein, 7 aa, synthetic construct
CKPSPLF

SEQ ID NO: 41721 - protein, 7 aa, synthetic construct
CLPKCCE

SEQ ID NO: 41722 - protein, 7 aa, synthetic construct
YSRIGKN

SEQ ID NO: 41723 - protein, 7 aa, synthetic construct
YWTGCRE

SEQ ID NO: 41724 - protein, 7 aa, synthetic construct
CAPSLHE

SEQ ID NO: 41725 - protein, 7 aa, synthetic construct
CKPLCCE

SEQ ID NO: 41726 - protein, 7 aa, synthetic construct
MTGDSCL

SEQ ID NO: 41727 - protein, 7 aa, synthetic construct
YFTGKCV

SEQ ID NO: 41728 - protein, 7 aa, synthetic construct
WFSGVRI

SEQ ID NO: 41729 - protein, 7 aa, synthetic construct
CGSIRPT

SEQ ID NO: 41730 - protein, 7 aa, synthetic construct
CSGPPKE

SEQ ID NO: 41731 - protein, 7 aa, synthetic construct
LCKPCLY

SEQ ID NO: 41732 - protein, 7 aa, synthetic construct
GCRPCPG

SEQ ID NO: 41733 - protein, 7 aa, synthetic construct
CTSKTGW

SEQ ID NO: 41734 - protein, 7 aa, synthetic construct
QDGSCKA

SEQ ID NO: 41735 - protein, 7 aa, synthetic construct
YFTGRWD

SEQ ID NO: 41736 - protein, 7 aa, synthetic construct
CRTSECC

SEQ ID NO: 41737 - protein, 7 aa, synthetic construct
LCKPELT

SEQ ID NO: 41738 - protein, 7 aa, synthetic construct
YCRLSDN

SEQ ID NO: 41739 - protein, 7 aa, synthetic construct
CTSPTGH

SEQ ID NO: 41740 - protein, 7 aa, synthetic construct
GGSPCRP

SEQ ID NO: 41741 - protein, 7 aa, synthetic construct
GSGMSLW

SEQ ID NO: 41742 - protein, 7 aa, synthetic construct
YEQGCKE

SEQ ID NO: 41743 - protein, 7 aa, synthetic construct
CGGGRPW

SEQ ID NO: 41744 - protein, 7 aa, synthetic construct
CAPHLHE

SEQ ID NO: 41745 - protein, 7 aa, synthetic construct
RDEFVYY

SEQ ID NO: 41746 - protein, 7 aa, synthetic construct
RDEFVIY

SEQ ID NO: 41747 - protein, 7 aa, synthetic construct
GCRSGDI

SEQ ID NO: 41748 - protein, 7 aa, synthetic construct
YSKRNVN

SEQ ID NO: 41749 - protein, 7 aa, synthetic construct
CNDPMTA

SEQ ID NO: 41750 - protein, 7 aa, synthetic construct
KHDFTCS

SEQ ID NO: 41751 - protein, 7 aa, synthetic construct
SDWTDRC

SEQ ID NO: 41752 - protein, 7 aa, synthetic construct
CAPYGHE

SEQ ID NO: 41753 - protein, 7 aa, synthetic construct
GVETRCP

SEQ ID NO: 41754 - protein, 7 aa, synthetic construct
YSYIGPN

SEQ ID NO: 41755 - protein, 7 aa, synthetic construct
MTGTRCL

SEQ ID NO: 41756 - protein, 7 aa, synthetic construct
GCRHGQI

SEQ ID NO: 41757 - protein, 7 aa, synthetic construct
YEPGCFE

SEQ ID NO: 41758 - protein, 7 aa, synthetic construct
CKPLCPG

SEQ ID NO: 41759 - protein, 7 aa, synthetic construct
CAAYLHE

SEQ ID NO: 41760 - protein, 7 aa, synthetic construct
SKGSCEQ

SEQ ID NO: 41761 - protein, 7 aa, synthetic construct
VCRPCPI

SEQ ID NO: 41762 - protein, 7 aa, synthetic construct
CTDKTGH

SEQ ID NO: 41763 - protein, 7 aa, synthetic construct
CTSKMGH

SEQ ID NO: 41764 - protein, 7 aa, synthetic construct
YSRWNLN

SEQ ID NO: 41765 - protein, 7 aa, synthetic construct
KCDNTGS

SEQ ID NO: 41766 - protein, 7 aa, synthetic construct
EWEACPR

SEQ ID NO: 41767 - protein, 7 aa, synthetic construct
ICDKRDP

SEQ ID NO: 41768 - protein, 7 aa, synthetic construct
FHRKSPD

SEQ ID NO: 41769 - protein, 7 aa, synthetic construct
MMGTSCL

SEQ ID NO: 41770 - protein, 7 aa, synthetic construct
YFAGRPD

SEQ ID NO: 41771 - protein, 7 aa, synthetic construct
VSTHCDA

SEQ ID NO: 41772 - protein, 7 aa, synthetic construct
VPECRPN

SEQ ID NO: 41773 - protein, 7 aa, synthetic construct
GGPHCCG

SEQ ID NO: 41774 - protein, 7 aa, synthetic construct
RDDFVAF

SEQ ID NO: 41775 - protein, 7 aa, synthetic construct
FEGTNCR

SEQ ID NO: 41776 - protein, 7 aa, synthetic construct
LCRPASE

SEQ ID NO: 41777 - protein, 7 aa, synthetic construct
RGEFTAY

SEQ ID NO: 41778 - protein, 7 aa, synthetic construct
MTGTSCT

SEQ ID NO: 41779 - protein, 7 aa, synthetic construct
CEFGPMP

SEQ ID NO: 41780 - protein, 7 aa, synthetic construct
MTGNSCL

SEQ ID NO: 41781 - protein, 7 aa, synthetic construct
CKPNPSV

SEQ ID NO: 41782 - protein, 7 aa, synthetic construct
FTGTSCL

SEQ ID NO: 41783 - protein, 7 aa, synthetic construct
YFTGNIN

SEQ ID NO: 41784 - protein, 7 aa, synthetic construct
CYPLRPE

SEQ ID NO: 41785 - protein, 7 aa, synthetic construct
CDGSYKA

SEQ ID NO: 41786 - protein, 7 aa, synthetic construct
CTSKTNH

SEQ ID NO: 41787 - protein, 7 aa, synthetic construct
STGTSCL

SEQ ID NO: 41788 - protein, 7 aa, synthetic construct
KKGSCEQ

SEQ ID NO: 41789 - protein, 7 aa, synthetic construct
CGKDCCP

SEQ ID NO: 41790 - protein, 7 aa, synthetic construct
KCKENEP

SEQ ID NO: 41791 - protein, 7 aa, synthetic construct
RTYNMYP

SEQ ID NO: 41792 - protein, 7 aa, synthetic construct
CKLEYKE

SEQ ID NO: 41793 - protein, 7 aa, synthetic construct
VNEFLPY

SEQ ID NO: 41794 - protein, 7 aa, synthetic construct
VCSKKPA

SEQ ID NO: 41795 - protein, 7 aa, synthetic construct
DRGGCKP

SEQ ID NO: 41796 - protein, 7 aa, synthetic construct
DLMSAGW

SEQ ID NO: 41797 - protein, 7 aa, synthetic construct
DMTSSQW

SEQ ID NO: 41798 - protein, 7 aa, synthetic construct
MGYDRGW

SEQ ID NO: 41799 - protein, 7 aa, synthetic construct
CKEVKGW

SEQ ID NO: 41800 - protein, 7 aa, synthetic construct
IRGIHHQ

SEQ ID NO: 41801 - protein, 7 aa, synthetic construct
FEEHPSW

SEQ ID NO: 41802 - protein, 7 aa, synthetic construct
GGDWSTY

SEQ ID NO: 41803 - protein, 7 aa, synthetic construct
LGRPCSE

SEQ ID NO: 41804 - protein, 7 aa, synthetic construct
IHKYVGG

SEQ ID NO: 41805 - protein, 7 aa, synthetic construct
REEFTVW

SEQ ID NO: 41806 - protein, 7 aa, synthetic construct
GTEYVSY

SEQ ID NO: 41807 - protein, 7 aa, synthetic construct
CKPLMLE

SEQ ID NO: 41808 - protein, 7 aa, synthetic construct
GRDGVRW

SEQ ID NO: 41809 - protein, 7 aa, synthetic construct
RLESINW

SEQ ID NO: 41810 - protein, 7 aa, synthetic construct
IPRTCPP

SEQ ID NO: 41811 - protein, 7 aa, synthetic construct
MTGVSCL

SEQ ID NO: 41812 - protein, 7 aa, synthetic construct
DFYGTPS

SEQ ID NO: 41813 - protein, 7 aa, synthetic construct
RNDTVYW

SEQ ID NO: 41814 - protein, 7 aa, synthetic construct
TWDGLLA

SEQ ID NO: 41815 - protein, 7 aa, synthetic construct
LCKPCKT

SEQ ID NO: 41816 - protein, 7 aa, synthetic construct
CKDGCCS

SEQ ID NO: 41817 - protein, 7 aa, synthetic construct
CKARDCC

SEQ ID NO: 41818 - protein, 7 aa, synthetic construct
RSPTSYW

SEQ ID NO: 41819 - protein, 7 aa, synthetic construct
GGEFSTW

SEQ ID NO: 41820 - protein, 7 aa, synthetic construct
CFKKSTS

SEQ ID NO: 41821 - protein, 7 aa, synthetic construct
CKPGTWP

SEQ ID NO: 41822 - protein, 7 aa, synthetic construct
GCRHGMI

SEQ ID NO: 41823 - protein, 7 aa, synthetic construct
LCKPILT

SEQ ID NO: 41824 - protein, 7 aa, synthetic construct
YWPGCKE

SEQ ID NO: 41825 - protein, 7 aa, synthetic construct
CKPKCPV

SEQ ID NO: 41826 - protein, 7 aa, synthetic construct
CGPGKCC

SEQ ID NO: 41827 - protein, 7 aa, synthetic construct
CHDFTGS

SEQ ID NO: 41828 - protein, 7 aa, synthetic construct
TNPFNKH

SEQ ID NO: 41829 - protein, 7 aa, synthetic construct
RPDFCPF

SEQ ID NO: 41830 - protein, 7 aa, synthetic construct
DSSWEMW

SEQ ID NO: 41831 - protein, 7 aa, synthetic construct
GKGTKCG

SEQ ID NO: 41832 - protein, 7 aa, synthetic construct
YHRRGPD

SEQ ID NO: 41833 - protein, 7 aa, synthetic construct
GSTPCCR

SEQ ID NO: 41834 - protein, 7 aa, synthetic construct
CLRACRP

SEQ ID NO: 41835 - protein, 7 aa, synthetic construct
GGERSCW

SEQ ID NO: 41836 - protein, 7 aa, synthetic construct
SCQDRSW

SEQ ID NO: 41837 - protein, 7 aa, synthetic construct
GSPCTPW

SEQ ID NO: 41838 - protein, 7 aa, synthetic construct
CAPYLGE

SEQ ID NO: 41839 - protein, 7 aa, synthetic construct
RTPCLGP

SEQ ID NO: 41840 - protein, 7 aa, synthetic construct
YSKYNCN

SEQ ID NO: 41841 - protein, 7 aa, synthetic construct
CKDVCCA

SEQ ID NO: 41842 - protein, 7 aa, synthetic construct
QNEFLPW

SEQ ID NO: 41843 - protein, 7 aa, synthetic construct
WTPMCRA

SEQ ID NO: 41844 - protein, 7 aa, synthetic construct
CKPDHWD

SEQ ID NO: 41845 - protein, 7 aa, synthetic construct
NSAYGLR

SEQ ID NO: 41846 - protein, 7 aa, synthetic construct
AGCDRGW

SEQ ID NO: 41847 - protein, 7 aa, synthetic construct
CAPDYRD

SEQ ID NO: 41848 - protein, 7 aa, synthetic construct
WTPMCMA

SEQ ID NO: 41849 - protein, 7 aa, synthetic construct
FAKYNCN

SEQ ID NO: 41850 - protein, 7 aa, synthetic construct
LCLPCSE

SEQ ID NO: 41851 - protein, 7 aa, synthetic construct
CKPTCCE

SEQ ID NO: 41852 - protein, 7 aa, synthetic construct
CNKPMTG

SEQ ID NO: 41853 - protein, 7 aa, synthetic construct
CKPKKCD

SEQ ID NO: 41854 - protein, 7 aa, synthetic construct
FSKMFYN

SEQ ID NO: 41855 - protein, 7 aa, synthetic construct
KYDYTGF

SEQ ID NO: 41856 - protein, 7 aa, synthetic construct
IYASSTW

SEQ ID NO: 41857 - protein, 7 aa, synthetic construct
PCKATCV

SEQ ID NO: 41858 - protein, 7 aa, synthetic construct
CTMKTGH

SEQ ID NO: 41859 - protein, 7 aa, synthetic construct
LCKPGLT

SEQ ID NO: 41860 - protein, 7 aa, synthetic construct
IKKNCCA

SEQ ID NO: 41861 - protein, 7 aa, synthetic construct
GGEFVSW

SEQ ID NO: 41862 - protein, 7 aa, synthetic construct
MTQTSCL

SEQ ID NO: 41863 - protein, 7 aa, synthetic construct
FHRYGPD

SEQ ID NO: 41864 - protein, 7 aa, synthetic construct
YSRCNLN

SEQ ID NO: 41865 - protein, 7 aa, synthetic construct
KFDYSSY

SEQ ID NO: 41866 - protein, 7 aa, synthetic construct
TDKSAGC

SEQ ID NO: 41867 - protein, 7 aa, synthetic construct
VPEFCPY

SEQ ID NO: 41868 - protein, 7 aa, synthetic construct
GEPGCKE

SEQ ID NO: 41869 - protein, 7 aa, synthetic construct
YRFSEGR

SEQ ID NO: 41870 - protein, 7 aa, synthetic construct
CLKPTSC

SEQ ID NO: 41871 - protein, 7 aa, synthetic construct
CKDGKHC

SEQ ID NO: 41872 - protein, 7 aa, synthetic construct
YGPGCKE

SEQ ID NO: 41873 - protein, 7 aa, synthetic construct
KHEFTAF

SEQ ID NO: 41874 - protein, 7 aa, synthetic construct
LCKPLLT

SEQ ID NO: 41875 - protein, 7 aa, synthetic construct
YWTGMIV

SEQ ID NO: 41876 - protein, 7 aa, synthetic construct
CSEQFPC

SEQ ID NO: 41877 - protein, 7 aa, synthetic construct
YCRDGEN

SEQ ID NO: 41878 - protein, 7 aa, synthetic construct
CKPNTSW

SEQ ID NO: 41879 - protein, 7 aa, synthetic construct
FAKCNIN

SEQ ID NO: 41880 - protein, 7 aa, synthetic construct
CHRLPPS

SEQ ID NO: 41881 - protein, 7 aa, synthetic construct
WTPMCKP

SEQ ID NO: 41882 - protein, 7 aa, synthetic construct
MSMTTDN

SEQ ID NO: 41883 - protein, 7 aa, synthetic construct
WSAITCN

SEQ ID NO: 41884 - protein, 7 aa, synthetic construct
RSEFSAF

SEQ ID NO: 41885 - protein, 7 aa, synthetic construct
CKGSMEQ

SEQ ID NO: 41886 - protein, 7 aa, synthetic construct
CGMLCTS

SEQ ID NO: 41887 - protein, 7 aa, synthetic construct
YEPGCKW

SEQ ID NO: 41888 - protein, 7 aa, synthetic construct
KDDYVPF

SEQ ID NO: 41889 - protein, 7 aa, synthetic construct
RDEYTSF

SEQ ID NO: 41890 - protein, 7 aa, synthetic construct
CNKPMYA

SEQ ID NO: 41891 - protein, 7 aa, synthetic construct
VSEFNSY

SEQ ID NO: 41892 - protein, 7 aa, synthetic construct
STERVCR

SEQ ID NO: 41893 - protein, 7 aa, synthetic construct
FHRMNSN

SEQ ID NO: 41894 - protein, 7 aa, synthetic construct
CKEGCCT

SEQ ID NO: 41895 - protein, 7 aa, synthetic construct
RDEYSVW

SEQ ID NO: 41896 - protein, 7 aa, synthetic construct
PMESPSW

SEQ ID NO: 41897 - protein, 7 aa, synthetic construct
GMGTSLW

SEQ ID NO: 41898 - protein, 7 aa, synthetic construct
CKAGCCA

SEQ ID NO: 41899 - protein, 7 aa, synthetic construct
RTPTCVR

SEQ ID NO: 41900 - protein, 7 aa, synthetic construct
CKGSWEQ

SEQ ID NO: 41901 - protein, 7 aa, synthetic construct
YWSGIHL

SEQ ID NO: 41902 - protein, 7 aa, synthetic construct
CCIKKCP

SEQ ID NO: 41903 - protein, 7 aa, synthetic construct
CLGGCCS

SEQ ID NO: 41904 - protein, 7 aa, synthetic construct
YSRKNLN

SEQ ID NO: 41905 - protein, 7 aa, synthetic construct
CKPGMRL

SEQ ID NO: 41906 - protein, 7 aa, synthetic construct
CLKDVNS

SEQ ID NO: 41907 - protein, 7 aa, synthetic construct
CTATVAL

SEQ ID NO: 41908 - protein, 7 aa, synthetic construct
YVKSDRL

SEQ ID NO: 41909 - protein, 7 aa, synthetic construct
LHKLTNN

SEQ ID NO: 41910 - protein, 7 aa, synthetic construct
YVKVDPK

SEQ ID NO: 41911 - protein, 7 aa, synthetic construct
LSRVGIN

SEQ ID NO: 41912 - protein, 7 aa, synthetic construct
YVKSDSK

SEQ ID NO: 41913 - protein, 7 aa, synthetic construct
LHRLLPT

SEQ ID NO: 41914 - protein, 7 aa, synthetic construct
YSKLNAL

SEQ ID NO: 41915 - protein, 7 aa, synthetic construct
LSRLNVN

SEQ ID NO: 41916 - protein, 7 aa, synthetic construct
YVKSDKL

SEQ ID NO: 41917 - protein, 7 aa, synthetic construct
YVKSDTK

SEQ ID NO: 41918 - protein, 7 aa, synthetic construct
YVKSDNK

SEQ ID NO: 41919 - protein, 7 aa, synthetic construct
LSRLSNN

SEQ ID NO: 41920 - protein, 7 aa, synthetic construct
LARTGPN

SEQ ID NO: 41921 - protein, 7 aa, synthetic construct
YVKSDQR

SEQ ID NO: 41922 - protein, 7 aa, synthetic construct
YLKSDNK

SEQ ID NO: 41923 - protein, 7 aa, synthetic construct
LSRVGNN

SEQ ID NO: 41924 - protein, 7 aa, synthetic construct
LSRTGPN

SEQ ID NO: 41925 - protein, 7 aa, synthetic construct
LSRIGNN

SEQ ID NO: 41926 - protein, 7 aa, synthetic construct
LHKNLMN

SEQ ID NO: 41927 - protein, 7 aa, synthetic construct
LTRISTN

SEQ ID NO: 41928 - protein, 7 aa, synthetic construct
LSRVGAN

SEQ ID NO: 41929 - protein, 7 aa, synthetic construct
LSRTAYN

SEQ ID NO: 41930 - protein, 7 aa, synthetic construct
YHKLNTN

SEQ ID NO: 41931 - protein, 7 aa, synthetic construct
YHKLNQN

SEQ ID NO: 41932 - protein, 7 aa, synthetic construct
YLKSDTK

SEQ ID NO: 41933 - protein, 7 aa, synthetic construct
YVKSDKQ

SEQ ID NO: 41934 - protein, 7 aa, synthetic construct
IHKLTIN

SEQ ID NO: 41935 - protein, 7 aa, synthetic construct
LHRLAVD

SEQ ID NO: 41936 - protein, 7 aa, synthetic construct
YIKSDTK

SEQ ID NO: 41937 - protein, 7 aa, synthetic construct
LHKAGIN

SEQ ID NO: 41938 - protein, 7 aa, synthetic construct
YIKSDIK

SEQ ID NO: 41939 - protein, 7 aa, synthetic construct
LHKASLN

SEQ ID NO: 41940 - protein, 7 aa, synthetic construct
YVKSDKN

SEQ ID NO: 41941 - protein, 7 aa, synthetic construct
LHKTGPN

SEQ ID NO: 41942 - protein, 7 aa, synthetic construct
LSRLNSN

SEQ ID NO: 41943 - protein, 7 aa, synthetic construct
LHKSLTN

SEQ ID NO: 41944 - protein, 7 aa, synthetic construct
YIKNDSK

SEQ ID NO: 41945 - protein, 7 aa, synthetic construct
LARTGFN

SEQ ID NO: 41946 - protein, 7 aa, synthetic construct
LSRVSTN

SEQ ID NO: 41947 - protein, 7 aa, synthetic construct
LARTATN

SEQ ID NO: 41948 - protein, 7 aa, synthetic construct
LARTGNN

SEQ ID NO: 41949 - protein, 7 aa, synthetic construct
YSKLGNN

SEQ ID NO: 41950 - protein, 7 aa, synthetic construct
HSKLNMN

SEQ ID NO: 41951 - protein, 7 aa, synthetic construct
LSKLSNN

SEQ ID NO: 41952 - protein, 7 aa, synthetic construct
LSRVGVN

SEQ ID NO: 41953 - protein, 7 aa, synthetic construct
LHKMGLN

SEQ ID NO: 41954 - protein, 7 aa, synthetic construct
YLKSDQR

SEQ ID NO: 41955 - protein, 7 aa, synthetic construct
LHKAGLN

SEQ ID NO: 41956 - protein, 7 aa, synthetic construct
LARTAAN

SEQ ID NO: 41957 - protein, 7 aa, synthetic construct
FVKSDNK

SEQ ID NO: 41958 - protein, 7 aa, synthetic construct
YVKNDLK

SEQ ID NO: 41959 - protein, 7 aa, synthetic construct
LHKLLHD

SEQ ID NO: 41960 - protein, 7 aa, synthetic construct
LHRLAND

SEQ ID NO: 41961 - protein, 7 aa, synthetic construct
LHKQGLN

SEQ ID NO: 41962 - protein, 7 aa, synthetic construct
LHKQGIN

SEQ ID NO: 41963 - protein, 7 aa, synthetic construct
LSRVSAN

SEQ ID NO: 41964 - protein, 7 aa, synthetic construct
LARTGVN

SEQ ID NO: 41965 - protein, 7 aa, synthetic construct
YTKSDTK

SEQ ID NO: 41966 - protein, 7 aa, synthetic construct
LHRLATD

SEQ ID NO: 41967 - protein, 7 aa, synthetic construct
LHKASIN

SEQ ID NO: 41968 - protein, 7 aa, synthetic construct
LHKASVN

SEQ ID NO: 41969 - protein, 7 aa, synthetic construct
LHRLTHD

SEQ ID NO: 41970 - protein, 7 aa, synthetic construct
LHRLTVD

SEQ ID NO: 41971 - protein, 7 aa, synthetic construct
LHKNLTN

SEQ ID NO: 41972 - protein, 7 aa, synthetic construct
LHKMSTN

SEQ ID NO: 41973 - protein, 7 aa, synthetic construct
LSKLNNN

SEQ ID NO: 41974 - protein, 7 aa, synthetic construct
YVKSDRQ

SEQ ID NO: 41975 - protein, 7 aa, synthetic construct
LHKMGNN

SEQ ID NO: 41976 - protein, 7 aa, synthetic construct
LHKAGVN

SEQ ID NO: 41977 - protein, 7 aa, synthetic construct
LSRLSEN

SEQ ID NO: 41978 - protein, 7 aa, synthetic construct
LTKLHSN

SEQ ID NO: 41979 - protein, 7 aa, synthetic construct
VASTNGR

SEQ ID NO: 41980 - protein, 7 aa, synthetic construct
VTSTNGR

SEQ ID NO: 41981 - protein, 7 aa, synthetic construct
LHRLNEN

SEQ ID NO: 41982 - protein, 7 aa, synthetic construct
LHKAGAN

SEQ ID NO: 41983 - protein, 7 aa, synthetic construct
LHKLGPD

SEQ ID NO: 41984 - protein, 7 aa, synthetic construct
LSRTAVN

SEQ ID NO: 41985 - protein, 7 aa, synthetic construct
LHKLSLD

SEQ ID NO: 41986 - protein, 7 aa, synthetic construct
LSKLSMN

SEQ ID NO: 41987 - protein, 7 aa, synthetic construct
LHKAGMN

SEQ ID NO: 41988 - protein, 7 aa, synthetic construct
LHKSLHN

SEQ ID NO: 41989 - protein, 7 aa, synthetic construct
LHKQGYN

SEQ ID NO: 41990 - protein, 7 aa, synthetic construct
YIKSDRN

SEQ ID NO: 41991 - protein, 7 aa, synthetic construct
LSRAGGG

SEQ ID NO: 41992 - protein, 7 aa, synthetic construct
LSRLSDN

SEQ ID NO: 41993 - protein, 7 aa, synthetic construct
LHRLQDT

SEQ ID NO: 41994 - protein, 7 aa, synthetic construct
YVKSDMF

SEQ ID NO: 41995 - protein, 7 aa, synthetic construct
LHRLGID

SEQ ID NO: 41996 - protein, 7 aa, synthetic construct
YSKLQSN

SEQ ID NO: 41997 - protein, 7 aa, synthetic construct
LSRVGSN

SEQ ID NO: 41998 - protein, 7 aa, synthetic construct
YVKSQVN

SEQ ID NO: 41999 - protein, 7 aa, synthetic construct
LHKLGLD

SEQ ID NO: 42000 - protein, 7 aa, synthetic construct
LSRLSLD

SEQ ID NO: 42001 - protein, 7 aa, synthetic construct
LHKSGVN

SEQ ID NO: 42002 - protein, 7 aa, synthetic construct
LHRLGTD

SEQ ID NO: 42003 - protein, 7 aa, synthetic construct
LHRLSTD

SEQ ID NO: 42004 - protein, 7 aa, synthetic construct
LHKQSVN

SEQ ID NO: 42005 - protein, 7 aa, synthetic construct
LHKLGYD

SEQ ID NO: 42006 - protein, 7 aa, synthetic construct
LHRLGSD

SEQ ID NO: 42007 - protein, 7 aa, synthetic construct
LHKQSLN

SEQ ID NO: 42008 - protein, 7 aa, synthetic construct
LSRVGTN

SEQ ID NO: 42009 - protein, 7 aa, synthetic construct
LHKAGNN

SEQ ID NO: 42010 - protein, 7 aa, synthetic construct
LHKLGVD

SEQ ID NO: 42011 - protein, 7 aa, synthetic construct
YVKSQNH

SEQ ID NO: 42012 - protein, 7 aa, synthetic construct
YHKNSPN

SEQ ID NO: 42013 - protein, 7 aa, synthetic construct
YHKTGPN

SEQ ID NO: 42014 - protein, 7 aa, synthetic construct
LHKLTDN

SEQ ID NO: 42015 - protein, 7 aa, synthetic construct
YHKAGMN

SEQ ID NO: 42016 - protein, 7 aa, synthetic construct
LHRLSDD

SEQ ID NO: 42017 - protein, 7 aa, synthetic construct
LHKSLSN

SEQ ID NO: 42018 - protein, 7 aa, synthetic construct
LSRTGLN

SEQ ID NO: 42019 - protein, 7 aa, synthetic construct
LHKLSDN

SEQ ID NO: 42020 - protein, 7 aa, synthetic construct
LHKQGVN

SEQ ID NO: 42021 - protein, 7 aa, synthetic construct
LHKMTTN

SEQ ID NO: 42022 - protein, 7 aa, synthetic construct
YHKLGAG

SEQ ID NO: 42023 - protein, 7 aa, synthetic construct
YHKSSPN

SEQ ID NO: 42024 - protein, 7 aa, synthetic construct
YVKTDTR

SEQ ID NO: 42025 - protein, 7 aa, synthetic construct
LHKASAN

SEQ ID NO: 42026 - protein, 7 aa, synthetic construct
LHKSTPN

SEQ ID NO: 42027 - protein, 7 aa, synthetic construct
LHRALPD

SEQ ID NO: 42028 - protein, 7 aa, synthetic construct
YSALNIN

SEQ ID NO: 42029 - protein, 7 aa, synthetic construct
WSKAGGG

SEQ ID NO: 42030 - protein, 7 aa, synthetic construct
YTKSDTR

SEQ ID NO: 42031 - protein, 7 aa, synthetic construct
YARNGNN

SEQ ID NO: 42032 - protein, 7 aa, synthetic construct
LHKASTN

SEQ ID NO: 42033 - protein, 7 aa, synthetic construct
VNSTNGR

SEQ ID NO: 42034 - protein, 7 aa, synthetic construct
IHRLTDN

SEQ ID NO: 42035 - protein, 7 aa, synthetic construct
LSRAGPN

SEQ ID NO: 42036 - protein, 7 aa, synthetic construct
YTKSDNK

SEQ ID NO: 42037 - protein, 7 aa, synthetic construct
HHKLQEN

SEQ ID NO: 42038 - protein, 7 aa, synthetic construct
LSRVSSN

SEQ ID NO: 42039 - protein, 7 aa, synthetic construct
YSKIGPD

SEQ ID NO: 42040 - protein, 7 aa, synthetic construct
LSRTSAN

SEQ ID NO: 42041 - protein, 7 aa, synthetic construct
LARTGTN

SEQ ID NO: 42042 - protein, 7 aa, synthetic construct
KDEMTHW

SEQ ID NO: 42043 - protein, 7 aa, synthetic construct
LHKNGVN

SEQ ID NO: 42044 - protein, 7 aa, synthetic construct
YSKLNEN

SEQ ID NO: 42045 - protein, 7 aa, synthetic construct
LHRSLEN

SEQ ID NO: 42046 - protein, 7 aa, synthetic construct
LHKNGLN

SEQ ID NO: 42047 - protein, 7 aa, synthetic construct
LHKSGIN

SEQ ID NO: 42048 - protein, 7 aa, synthetic construct
LHVRTVN

SEQ ID NO: 42049 - protein, 7 aa, synthetic construct
LHSLLPN

SEQ ID NO: 42050 - protein, 7 aa, synthetic construct
ISSTNGR

SEQ ID NO: 42051 - protein, 7 aa, synthetic construct
LHRLQTD

SEQ ID NO: 42052 - protein, 7 aa, synthetic construct
YHKSQPN

SEQ ID NO: 42053 - protein, 7 aa, synthetic construct
YSRLHDN

SEQ ID NO: 42054 - protein, 7 aa, synthetic construct
LSRTANN

SEQ ID NO: 42055 - protein, 7 aa, synthetic construct
YHSLGPN

SEQ ID NO: 42056 - protein, 7 aa, synthetic construct
LHKAGTN

SEQ ID NO: 42057 - protein, 7 aa, synthetic construct
LHKQGNN

SEQ ID NO: 42058 - protein, 7 aa, synthetic construct
LSKLSEN

SEQ ID NO: 42059 - protein, 7 aa, synthetic construct
LSRISSN

SEQ ID NO: 42060 - protein, 7 aa, synthetic construct
LSRTSQN

SEQ ID NO: 42061 - protein, 7 aa, synthetic construct
LHKNSIN

SEQ ID NO: 42062 - protein, 7 aa, synthetic construct
LHKQGTN

SEQ ID NO: 42063 - protein, 7 aa, synthetic construct
LSRVGEN

SEQ ID NO: 42064 - protein, 7 aa, synthetic construct
YVKSDPR

SEQ ID NO: 42065 - protein, 7 aa, synthetic construct
LHKASNN

SEQ ID NO: 42066 - protein, 7 aa, synthetic construct
LHKLSAD

SEQ ID NO: 42067 - protein, 7 aa, synthetic construct
YHKLSDN

SEQ ID NO: 42068 - protein, 7 aa, synthetic construct
LARSGLN

SEQ ID NO: 42069 - protein, 7 aa, synthetic construct
LHKYGEN

SEQ ID NO: 42070 - protein, 7 aa, synthetic construct
YVKSDQN

SEQ ID NO: 42071 - protein, 7 aa, synthetic construct
LHRLQDS

SEQ ID NO: 42072 - protein, 7 aa, synthetic construct
YVRSDNN

SEQ ID NO: 42073 - protein, 7 aa, synthetic construct
YLKSQNS

SEQ ID NO: 42074 - protein, 7 aa, synthetic construct
YSRVSPN

SEQ ID NO: 42075 - protein, 7 aa, synthetic construct
YVKNDPK

SEQ ID NO: 42076 - protein, 7 aa, synthetic construct
LSRTSSN

SEQ ID NO: 42077 - protein, 7 aa, synthetic construct
LHKQSMN

SEQ ID NO: 42078 - protein, 7 aa, synthetic construct
YVKTDTK

SEQ ID NO: 42079 - protein, 7 aa, synthetic construct
YSRLNAP

SEQ ID NO: 42080 - protein, 7 aa, synthetic construct
YARTSAN

SEQ ID NO: 42081 - protein, 7 aa, synthetic construct
LSRTGVN

SEQ ID NO: 42082 - protein, 7 aa, synthetic construct
LARAGPN

SEQ ID NO: 42083 - protein, 7 aa, synthetic construct
LHKSSIN

SEQ ID NO: 42084 - protein, 7 aa, synthetic construct
YSRAGGG

SEQ ID NO: 42085 - protein, 7 aa, synthetic construct
YVKSDNN

SEQ ID NO: 42086 - protein, 7 aa, synthetic construct
LSRTGNN

SEQ ID NO: 42087 - protein, 7 aa, synthetic construct
LSRTGHN

SEQ ID NO: 42088 - protein, 7 aa, synthetic construct
YVKSDTT

SEQ ID NO: 42089 - protein, 7 aa, synthetic construct
LSRLNEN

SEQ ID NO: 42090 - protein, 7 aa, synthetic construct
LSRTATN

SEQ ID NO: 42091 - protein, 7 aa, synthetic construct
YIKTDTK

SEQ ID NO: 42092 - protein, 7 aa, synthetic construct
YVKSDNT

SEQ ID NO: 42093 - protein, 7 aa, synthetic construct
LHARTMN

SEQ ID NO: 42094 - protein, 7 aa, synthetic construct
LHKSGNN

SEQ ID NO: 42095 - protein, 7 aa, synthetic construct
RLLDAFP

SEQ ID NO: 42096 - protein, 7 aa, synthetic construct
WVKSDLR

SEQ ID NO: 42097 - protein, 7 aa, synthetic construct
LHRAGTN

SEQ ID NO: 42098 - protein, 7 aa, synthetic construct
LARTSIN

SEQ ID NO: 42099 - protein, 7 aa, synthetic construct
LHKSQVN

SEQ ID NO: 42100 - protein, 7 aa, synthetic construct
LHRSLAN

SEQ ID NO: 42101 - protein, 7 aa, synthetic construct
LARTGSN

SEQ ID NO: 42102 - protein, 7 aa, synthetic construct
LHRQLEN

SEQ ID NO: 42103 - protein, 7 aa, synthetic construct
KNEFSTY

SEQ ID NO: 42104 - protein, 7 aa, synthetic construct
RLIDAYP

SEQ ID NO: 42105 - protein, 7 aa, synthetic construct
YVKSDTN

SEQ ID NO: 42106 - protein, 7 aa, synthetic construct
IATKGWD

SEQ ID NO: 42107 - protein, 7 aa, synthetic construct
LAKSAPN

SEQ ID NO: 42108 - protein, 7 aa, synthetic construct
LSKVSFN

SEQ ID NO: 42109 - protein, 7 aa, synthetic construct
LARTSLN

SEQ ID NO: 42110 - protein, 7 aa, synthetic construct
YARTSMN

SEQ ID NO: 42111 - protein, 7 aa, synthetic construct
YVKSDHT

SEQ ID NO: 42112 - protein, 7 aa, synthetic construct
YVKTDNK

SEQ ID NO: 42113 - protein, 7 aa, synthetic construct
YIKSDNN

SEQ ID NO: 42114 - protein, 7 aa, synthetic construct
LHKSSLN

SEQ ID NO: 42115 - protein, 7 aa, synthetic construct
YSRLNTD

SEQ ID NO: 42116 - protein, 7 aa, synthetic construct
LARTGQN

SEQ ID NO: 42117 - protein, 7 aa, synthetic construct
YTKLHTN

SEQ ID NO: 42118 - protein, 7 aa, synthetic construct
LHRTGQN

SEQ ID NO: 42119 - protein, 7 aa, synthetic construct
LSRAGAN

SEQ ID NO: 42120 - protein, 7 aa, synthetic construct
RARTDDH

SEQ ID NO: 42121 - protein, 7 aa, synthetic construct
IHRLLND

SEQ ID NO: 42122 - protein, 7 aa, synthetic construct
YSKLSNN

SEQ ID NO: 42123 - protein, 7 aa, synthetic construct
YLKSQDN

SEQ ID NO: 42124 - protein, 7 aa, synthetic construct
LHAKTVN

SEQ ID NO: 42125 - protein, 7 aa, synthetic construct
YARNGPD

SEQ ID NO: 42126 - protein, 7 aa, synthetic construct
YHKAQSN

SEQ ID NO: 42127 - protein, 7 aa, synthetic construct
YHKAGSN

SEQ ID NO: 42128 - protein, 7 aa, synthetic construct
YHKAGIN

SEQ ID NO: 42129 - protein, 7 aa, synthetic construct
YSRVGDN

SEQ ID NO: 42130 - protein, 7 aa, synthetic construct
YARTGEN

SEQ ID NO: 42131 - protein, 7 aa, synthetic construct
WVKSDTR

SEQ ID NO: 42132 - protein, 7 aa, synthetic construct
YVKSDDH

SEQ ID NO: 42133 - protein, 7 aa, synthetic construct
YIKSDTN

SEQ ID NO: 42134 - protein, 7 aa, synthetic construct
YVKSDAN

SEQ ID NO: 42135 - protein, 7 aa, synthetic construct
PGATSGW

SEQ ID NO: 42136 - protein, 7 aa, synthetic construct
LHKSSVN

SEQ ID NO: 42137 - protein, 7 aa, synthetic construct
LHKSGLN

SEQ ID NO: 42138 - protein, 7 aa, synthetic construct
LHKAAAN

SEQ ID NO: 42139 - protein, 7 aa, synthetic construct
LHRQGYD

SEQ ID NO: 42140 - protein, 7 aa, synthetic construct
RTEYTYP

SEQ ID NO: 42141 - protein, 7 aa, synthetic construct
YHRLSDS

SEQ ID NO: 42142 - protein, 7 aa, synthetic construct
YSRLNAD

SEQ ID NO: 42143 - protein, 7 aa, synthetic construct
LSRIGGG

SEQ ID NO: 42144 - protein, 7 aa, synthetic construct
LRTGEGP

SEQ ID NO: 42145 - protein, 7 aa, synthetic construct
LSKLNYD

SEQ ID NO: 42146 - protein, 7 aa, synthetic construct
YSRISAN

SEQ ID NO: 42147 - protein, 7 aa, synthetic construct
LHKAATN

SEQ ID NO: 42148 - protein, 7 aa, synthetic construct
YSRVGAG

SEQ ID NO: 42149 - protein, 7 aa, synthetic construct
LHKNGAN

SEQ ID NO: 42150 - protein, 7 aa, synthetic construct
YHKSGLN

SEQ ID NO: 42151 - protein, 7 aa, synthetic construct
LHKQSTN

SEQ ID NO: 42152 - protein, 7 aa, synthetic construct
LHRNGIN

SEQ ID NO: 42153 - protein, 7 aa, synthetic construct
LHKSGTN

SEQ ID NO: 42154 - protein, 7 aa, synthetic construct
LHRAGEN

SEQ ID NO: 42155 - protein, 7 aa, synthetic construct
RTAEVYP

SEQ ID NO: 42156 - protein, 7 aa, synthetic construct
LHRQGTN

SEQ ID NO: 42157 - protein, 7 aa, synthetic construct
VSDYVTF

SEQ ID NO: 42158 - protein, 7 aa, synthetic construct
LHKAQTN

SEQ ID NO: 42159 - protein, 7 aa, synthetic construct
LHKQGSN

SEQ ID NO: 42160 - protein, 7 aa, synthetic construct
VESTNGK

SEQ ID NO: 42161 - protein, 7 aa, synthetic construct
LHKALPI

SEQ ID NO: 42162 - protein, 7 aa, synthetic construct
YARTGDN

SEQ ID NO: 42163 - protein, 7 aa, synthetic construct
LHRDGPN

SEQ ID NO: 42164 - protein, 7 aa, synthetic construct
VYSTNGR

SEQ ID NO: 42165 - protein, 7 aa, synthetic construct
TADNIYF

SEQ ID NO: 42166 - protein, 7 aa, synthetic construct
LHRALHD

SEQ ID NO: 42167 - protein, 7 aa, synthetic construct
YHKMSTN

SEQ ID NO: 42168 - protein, 7 aa, synthetic construct
YSRLNSD

SEQ ID NO: 42169 - protein, 7 aa, synthetic construct
YSRTQTN

SEQ ID NO: 42170 - protein, 7 aa, synthetic construct
HHKLSNN

SEQ ID NO: 42171 - protein, 7 aa, synthetic construct
LHKSSTN

SEQ ID NO: 42172 - protein, 7 aa, synthetic construct
VGSTNGR

SEQ ID NO: 42173 - protein, 7 aa, synthetic construct
YHKLTEN

SEQ ID NO: 42174 - protein, 7 aa, synthetic construct
LHKSTAN

SEQ ID NO: 42175 - protein, 7 aa, synthetic construct
LHKSSAN

SEQ ID NO: 42176 - protein, 7 aa, synthetic construct
LARSGMN

SEQ ID NO: 42177 - protein, 7 aa, synthetic construct
YVKTDNR

SEQ ID NO: 42178 - protein, 7 aa, synthetic construct
LHRNGVN

SEQ ID NO: 42179 - protein, 7 aa, synthetic construct
SSDFVSF

SEQ ID NO: 42180 - protein, 7 aa, synthetic construct
LHKNGMN

SEQ ID NO: 42181 - protein, 7 aa, synthetic construct
YTKSDMR

SEQ ID NO: 42182 - protein, 7 aa, synthetic construct
LHKNGTN

SEQ ID NO: 42183 - protein, 7 aa, synthetic construct
TDEFTSY

SEQ ID NO: 42184 - protein, 7 aa, synthetic construct
YHRNGPD

SEQ ID NO: 42185 - protein, 7 aa, synthetic construct
YVKSNNS

SEQ ID NO: 42186 - protein, 7 aa, synthetic construct
LHKSSYN

SEQ ID NO: 42187 - protein, 7 aa, synthetic construct
LHARSVN

SEQ ID NO: 42188 - protein, 7 aa, synthetic construct
YSKLNTD

SEQ ID NO: 42189 - protein, 7 aa, synthetic construct
LSRTASN

SEQ ID NO: 42190 - protein, 7 aa, synthetic construct
YHKNGAN

SEQ ID NO: 42191 - protein, 7 aa, synthetic construct
LHRTSVN

SEQ ID NO: 42192 - protein, 7 aa, synthetic construct
LHKAGSN

SEQ ID NO: 42193 - protein, 7 aa, synthetic construct
LHRSGVN

SEQ ID NO: 42194 - protein, 7 aa, synthetic construct
LHRASTN

SEQ ID NO: 42195 - protein, 7 aa, synthetic construct
YSKLNLD

SEQ ID NO: 42196 - protein, 7 aa, synthetic construct
LSRTGTN

SEQ ID NO: 42197 - protein, 7 aa, synthetic construct
VESTNGM

SEQ ID NO: 42198 - protein, 7 aa, synthetic construct
YVHSDLK

SEQ ID NO: 42199 - protein, 7 aa, synthetic construct
YALEGRD

SEQ ID NO: 42200 - protein, 7 aa, synthetic construct
LHREGPN

SEQ ID NO: 42201 - protein, 7 aa, synthetic construct
YHKSGMN

SEQ ID NO: 42202 - protein, 7 aa, synthetic construct
YHRTGPD

SEQ ID NO: 42203 - protein, 7 aa, synthetic construct
LHRHGDN

SEQ ID NO: 42204 - protein, 7 aa, synthetic construct
LHKLGTD

SEQ ID NO: 42205 - protein, 7 aa, synthetic construct
LHKLTLD

SEQ ID NO: 42206 - protein, 7 aa, synthetic construct
LRSGEGP

SEQ ID NO: 42207 - protein, 7 aa, synthetic construct
LARSGTN

SEQ ID NO: 42208 - protein, 7 aa, synthetic construct
LMQDAYP

SEQ ID NO: 42209 - protein, 7 aa, synthetic construct
LSRISDN

SEQ ID NO: 42210 - protein, 7 aa, synthetic construct
RTQDSYP

SEQ ID NO: 42211 - protein, 7 aa, synthetic construct
LSRLNTD

SEQ ID NO: 42212 - protein, 7 aa, synthetic construct
LHKQTLN

SEQ ID NO: 42213 - protein, 7 aa, synthetic construct
YHKAGVN

SEQ ID NO: 42214 - protein, 7 aa, synthetic construct
YHKNGPG

SEQ ID NO: 42215 - protein, 7 aa, synthetic construct
YVKSQST

SEQ ID NO: 42216 - protein, 7 aa, synthetic construct
FHKLSEN

SEQ ID NO: 42217 - protein, 7 aa, synthetic construct
ACVIKPS

SEQ ID NO: 42218 - protein, 7 aa, synthetic construct
RNDECCF

SEQ ID NO: 42219 - protein, 7 aa, synthetic construct
YVKSDAM

SEQ ID NO: 42220 - protein, 7 aa, synthetic construct
LHKASSN

SEQ ID NO: 42221 - protein, 7 aa, synthetic construct
RTNEVYP

SEQ ID NO: 42222 - protein, 7 aa, synthetic construct
YIKHDTN

SEQ ID NO: 42223 - protein, 7 aa, synthetic construct
KSDFVAY

SEQ ID NO: 42224 - protein, 7 aa, synthetic construct
YHKSTPN

SEQ ID NO: 42225 - protein, 7 aa, synthetic construct
LHKHGDN

SEQ ID NO: 42226 - protein, 7 aa, synthetic construct
LARGSFN

SEQ ID NO: 42227 - protein, 7 aa, synthetic construct
MHKLSSN

SEQ ID NO: 42228 - protein, 7 aa, synthetic construct
VNSTHGR

SEQ ID NO: 42229 - protein, 7 aa, synthetic construct
HGNGNFV

SEQ ID NO: 42230 - protein, 7 aa, synthetic construct
YVKSDHK

SEQ ID NO: 42231 - protein, 7 aa, synthetic construct
LHRNLDN

SEQ ID NO: 42232 - protein, 7 aa, synthetic construct
YSSTNGM

SEQ ID NO: 42233 - protein, 7 aa, synthetic construct
YSRVGTD

SEQ ID NO: 42234 - protein, 7 aa, synthetic construct
GDEFKIF

SEQ ID NO: 42235 - protein, 7 aa, synthetic construct
RNQDVFP

SEQ ID NO: 42236 - protein, 7 aa, synthetic construct
LSRAATN

SEQ ID NO: 42237 - protein, 7 aa, synthetic construct
LSKTSFN

SEQ ID NO: 42238 - protein, 7 aa, synthetic construct
LSKLHSN

SEQ ID NO: 42239 - protein, 7 aa, synthetic construct
LARTSTN

SEQ ID NO: 42240 - protein, 7 aa, synthetic construct
LHKSTVN

SEQ ID NO: 42241 - protein, 7 aa, synthetic construct
TSENTYF

SEQ ID NO: 42242 - protein, 7 aa, synthetic construct
LHKMASN

SEQ ID NO: 42243 - protein, 7 aa, synthetic construct
LHKSLGN

SEQ ID NO: 42244 - protein, 7 aa, synthetic construct
LHRSSEN

SEQ ID NO: 42245 - protein, 7 aa, synthetic construct
LHKMGEN

SEQ ID NO: 42246 - protein, 7 aa, synthetic construct
YVKSQIT

SEQ ID NO: 42247 - protein, 7 aa, synthetic construct
TDEWTGF

SEQ ID NO: 42248 - protein, 7 aa, synthetic construct
LHRQTNN

SEQ ID NO: 42249 - protein, 7 aa, synthetic construct
TKWGDNP

SEQ ID NO: 42250 - protein, 7 aa, synthetic construct
LHRTTAN

SEQ ID NO: 42251 - protein, 7 aa, synthetic construct
YHRAGEN

SEQ ID NO: 42252 - protein, 7 aa, synthetic construct
YVRNGPN

SEQ ID NO: 42253 - protein, 7 aa, synthetic construct
LHAKSTN

SEQ ID NO: 42254 - protein, 7 aa, synthetic construct
LHKNSNN

SEQ ID NO: 42255 - protein, 7 aa, synthetic construct
LHRTTTN

SEQ ID NO: 42256 - protein, 7 aa, synthetic construct
IHDRMCS

SEQ ID NO: 42257 - protein, 7 aa, synthetic construct
NALIGFD

SEQ ID NO: 42258 - protein, 7 aa, synthetic construct
YLKSDNN

SEQ ID NO: 42259 - protein, 7 aa, synthetic construct
RTDQVYP

SEQ ID NO: 42260 - protein, 7 aa, synthetic construct
RDDTVFP

SEQ ID NO: 42261 - protein, 7 aa, synthetic construct
YVKSDPN

SEQ ID NO: 42262 - protein, 7 aa, synthetic construct
LARTSNN

SEQ ID NO: 42263 - protein, 7 aa, synthetic construct
LSKSSFN

SEQ ID NO: 42264 - protein, 7 aa, synthetic construct
YLKSDTS

SEQ ID NO: 42265 - protein, 7 aa, synthetic construct
YARSSTN

SEQ ID NO: 42266 - protein, 7 aa, synthetic construct
LHKSTIN

SEQ ID NO: 42267 - protein, 7 aa, synthetic construct
KSEYYAH

SEQ ID NO: 42268 - protein, 7 aa, synthetic construct
YTKTQSN

SEQ ID NO: 42269 - protein, 7 aa, synthetic construct
LHRSATN

SEQ ID NO: 42270 - protein, 7 aa, synthetic construct
HSRLSEN

SEQ ID NO: 42271 - protein, 7 aa, synthetic construct
DVGDRCK

SEQ ID NO: 42272 - protein, 7 aa, synthetic construct
LHRNGEN

SEQ ID NO: 42273 - protein, 7 aa, synthetic construct
LHARGDN

SEQ ID NO: 42274 - protein, 7 aa, synthetic construct
RNDMVYP

SEQ ID NO: 42275 - protein, 7 aa, synthetic construct
YHRSGEN

SEQ ID NO: 42276 - protein, 7 aa, synthetic construct
LHRQTYD

SEQ ID NO: 42277 - protein, 7 aa, synthetic construct
FSRAGAN

SEQ ID NO: 42278 - protein, 7 aa, synthetic construct
LHRTSTN

SEQ ID NO: 42279 - protein, 7 aa, synthetic construct
LHKSTMN

SEQ ID NO: 42280 - protein, 7 aa, synthetic construct
LHRSQDN

SEQ ID NO: 42281 - protein, 7 aa, synthetic construct
LHKQATN

SEQ ID NO: 42282 - protein, 7 aa, synthetic construct
LHRLGTQ

SEQ ID NO: 42283 - protein, 7 aa, synthetic construct
LHKSTLN

SEQ ID NO: 42284 - protein, 7 aa, synthetic construct
LHRSTAN

SEQ ID NO: 42285 - protein, 7 aa, synthetic construct
LHAKSNN

SEQ ID NO: 42286 - protein, 7 aa, synthetic construct
YHKSGSN

SEQ ID NO: 42287 - protein, 7 aa, synthetic construct
LHRLGTG

SEQ ID NO: 42288 - protein, 7 aa, synthetic construct
LHKSQSN

SEQ ID NO: 42289 - protein, 7 aa, synthetic construct
LHKAAQN

SEQ ID NO: 42290 - protein, 7 aa, synthetic construct
LHKSGSN

SEQ ID NO: 42291 - protein, 7 aa, synthetic construct
LHKSTTN

SEQ ID NO: 42292 - protein, 7 aa, synthetic construct
CPPQRTI

SEQ ID NO: 42293 - protein, 7 aa, synthetic construct
LHKSSSN

SEQ ID NO: 42294 - protein, 7 aa, synthetic construct
LHRTMTN

SEQ ID NO: 42295 - protein, 7 aa, synthetic construct
YTKSDKF

SEQ ID NO: 42296 - protein, 7 aa, synthetic construct
IHKLSMN

SEQ ID NO: 42297 - protein, 7 aa, synthetic construct
YHKSGQN

SEQ ID NO: 42298 - protein, 7 aa, synthetic construct
LHKSATN

SEQ ID NO: 42299 - protein, 7 aa, synthetic construct
YVKHDTH

SEQ ID NO: 42300 - protein, 7 aa, synthetic construct
LHKTGIN

SEQ ID NO: 42301 - protein, 7 aa, synthetic construct
NPTGCET

SEQ ID NO: 42302 - protein, 7 aa, synthetic construct
LHRTSQN

SEQ ID NO: 42303 - protein, 7 aa, synthetic construct
YVKTDMK

SEQ ID NO: 42304 - protein, 7 aa, synthetic construct
LHKSMTN

SEQ ID NO: 42305 - protein, 7 aa, synthetic construct
YHKLNIV

SEQ ID NO: 42306 - protein, 7 aa, synthetic construct
YIKHDLS

SEQ ID NO: 42307 - protein, 7 aa, synthetic construct
YVKNDKN

SEQ ID NO: 42308 - protein, 7 aa, synthetic construct
YVKTDSR

SEQ ID NO: 42309 - protein, 7 aa, synthetic construct
YIKHDQN

SEQ ID NO: 42310 - protein, 7 aa, synthetic construct
VEDSNCR

SEQ ID NO: 42311 - protein, 7 aa, synthetic construct
LHKYTVN

SEQ ID NO: 42312 - protein, 7 aa, synthetic construct
LCKTCTN

SEQ ID NO: 42313 - protein, 7 aa, synthetic construct
LHKSAMN

SEQ ID NO: 42314 - protein, 7 aa, synthetic construct
YVKNDQK

SEQ ID NO: 42315 - protein, 7 aa, synthetic construct
LHKATSN

SEQ ID NO: 42316 - protein, 7 aa, synthetic construct
YARGGSG

SEQ ID NO: 42317 - protein, 7 aa, synthetic construct
LHKSANN

SEQ ID NO: 42318 - protein, 7 aa, synthetic construct
IGTRCFD

SEQ ID NO: 42319 - protein, 7 aa, synthetic construct
WNVLTCN

SEQ ID NO: 42320 - protein, 7 aa, synthetic construct
KHGGLCM

SEQ ID NO: 42321 - protein, 7 aa, synthetic construct
FHKAGFN

SEQ ID NO: 42322 - protein, 7 aa, synthetic construct
CRIGKNP

SEQ ID NO: 42323 - protein, 7 aa, synthetic construct
WVKSDTM

SEQ ID NO: 42324 - protein, 7 aa, synthetic construct
LHKSALN

SEQ ID NO: 42325 - protein, 7 aa, synthetic construct
LHKLQNS

SEQ ID NO: 42326 - protein, 7 aa, synthetic construct
DSGTCKA

SEQ ID NO: 42327 - protein, 7 aa, synthetic construct
YHKLSTG

SEQ ID NO: 42328 - protein, 7 aa, synthetic construct
YVKTDKY

SEQ ID NO: 42329 - protein, 7 aa, synthetic construct
LHKSTNN

SEQ ID NO: 42330 - protein, 7 aa, synthetic construct
YVHSNTK

SEQ ID NO: 42331 - protein, 7 aa, synthetic construct
LHKSMQN

SEQ ID NO: 42332 - protein, 7 aa, synthetic construct
NVRCESE

SEQ ID NO: 42333 - protein, 7 aa, synthetic construct
YHKLSAG

SEQ ID NO: 42334 - protein, 7 aa, synthetic construct
WNKSGQG

SEQ ID NO: 42335 - protein, 7 aa, synthetic construct
LHKTGNN

SEQ ID NO: 42336 - protein, 7 aa, synthetic construct
CDPTKKS

SEQ ID NO: 42337 - protein, 7 aa, synthetic construct
CKGPEQV

SEQ ID NO: 42338 - protein, 7 aa, synthetic construct
KFDHMGT

SEQ ID NO: 42339 - protein, 7 aa, synthetic construct
GTACGKL

SEQ ID NO: 42340 - protein, 7 aa, synthetic construct
YIKNDKS

SEQ ID NO: 42341 - protein, 7 aa, synthetic construct
YHRTNTG

SEQ ID NO: 42342 - protein, 7 aa, synthetic construct
THRLASN

SEQ ID NO: 42343 - protein, 7 aa, synthetic construct
SYKNSTY

SEQ ID NO: 42344 - protein, 7 aa, synthetic construct
YVKHGTT

SEQ ID NO: 42345 - protein, 7 aa, synthetic construct
GDSEKCR

SEQ ID NO: 42346 - protein, 7 aa, synthetic construct
YVKSSNQ

SEQ ID NO: 42347 - protein, 7 aa, synthetic construct
YLKSMSN

SEQ ID NO: 42348 - protein, 7 aa, synthetic construct
LHKHSFD

SEQ ID NO: 42349 - protein, 7 aa, synthetic construct
ITGNLKC

SEQ ID NO: 42350 - protein, 7 aa, synthetic construct
WIKSVNT

SEQ ID NO: 42351 - protein, 7 aa, synthetic construct
CNNFLSE

SEQ ID NO: 42352 - protein, 7 aa, synthetic construct
IKYITKD

SEQ ID NO: 42353 - protein, 7 aa, synthetic construct
VRDKHGN

SEQ ID NO: 42354 - protein, 7 aa, synthetic construct
KWDHAGS

SEQ ID NO: 42355 - protein, 7 aa, synthetic construct
MSCKDTC

SEQ ID NO: 42356 - protein, 7 aa, synthetic construct
MNKHVHS

SEQ ID NO: 42357 - protein, 7 aa, synthetic construct
IKYQTKD

SEQ ID NO: 42358 - protein, 7 aa, synthetic construct
IKYSTSA

SEQ ID NO: 42359 - protein, 7 aa, synthetic construct
SPSPGCM

SEQ ID NO: 42360 - protein, 7 aa, synthetic construct
MESCAKN

SEQ ID NO: 42361 - protein, 7 aa, synthetic construct
EKFIHSS

SEQ ID NO: 42362 - protein, 7 aa, synthetic construct
KYDHMGT

SEQ ID NO: 42363 - protein, 7 aa, synthetic construct
GEKLYRA

SEQ ID NO: 42364 - protein, 7 aa, synthetic construct
INNLCVA

SEQ ID NO: 42365 - protein, 7 aa, synthetic construct
KYDAKGY

SEQ ID NO: 42366 - protein, 7 aa, synthetic construct
YYKSSAS

SEQ ID NO: 42367 - protein, 7 aa, synthetic construct
RCDKMCS

SEQ ID NO: 42368 - protein, 7 aa, synthetic construct
MHKVTHS

SEQ ID NO: 42369 - protein, 7 aa, synthetic construct
SMAYIKQ

SEQ ID NO: 42370 - protein, 7 aa, synthetic construct
SSYLQTK

SEQ ID NO: 42371 - protein, 7 aa, synthetic construct
YVKHDKS

SEQ ID NO: 42372 - protein, 7 aa, synthetic construct
LSRTTSN

SEQ ID NO: 42373 - protein, 7 aa, synthetic construct
KWDHAGA

SEQ ID NO: 42374 - protein, 7 aa, synthetic construct
LTALRKV

SEQ ID NO: 42375 - protein, 7 aa, synthetic construct
KFDHTSK

SEQ ID NO: 42376 - protein, 7 aa, synthetic construct
KFDHTGS

SEQ ID NO: 42377 - protein, 7 aa, synthetic construct
CRANAMP

SEQ ID NO: 42378 - protein, 7 aa, synthetic construct
KFDHMGS

SEQ ID NO: 42379 - protein, 7 aa, synthetic construct
KFDHRGE

SEQ ID NO: 42380 - protein, 7 aa, synthetic construct
CAKFLVS

SEQ ID NO: 42381 - protein, 7 aa, synthetic construct
KFDHQGV

SEQ ID NO: 42382 - protein, 7 aa, synthetic construct
AWLKEGT

SEQ ID NO: 42383 - protein, 7 aa, synthetic construct
KFDHQGN

SEQ ID NO: 42384 - protein, 33 aa, synthetic construct
YMFLSHTAKRAGILMNQSTVNGATHNFIPLYDN

SEQ ID NO: 42385 - protein, 31 aa, synthetic construct
YMLSHTAKRAGILMNQSTVNATHNFIPLYDN

SEQ ID NO: 42386 - protein, 34 aa, synthetic construct
YMLSHTAKRAGILMNQSTVGAGFHILNPSTVYDN

SEQ ID NO: 42387 - protein, 21 aa, synthetic construct
LYAHSKRAGHILMNQSTVGPD

SEQ ID NO: 42388 - protein, 21 aa, synthetic construct
LYAHSKRAGHILMNQSTVGPN

SEQ ID NO: 42389 - protein, 28 aa, synthetic construct
YSKAILMNQSTVGYPTQVFLHSAEDIMN

SEQ ID NO: 42390 - protein, 21 aa, synthetic construct
LYSRKVITLASAPRYFHIKWD

SEQ ID NO: 42391 - protein, 35 aa, synthetic construct
FLMYHKRALMAGLMNQSTADEFHILMNQPSTVYDN

SEQ ID NO: 42392 - protein, 33 aa, synthetic construct
LMYHKRALMAGLMNQSTADEFHILMNQPSTVYN

SEQ ID NO: 42393 - protein, 33 aa, synthetic construct
LMYHKRALMAGLMNQSTADEFHILMNQPSTVYD

SEQ ID NO: 42394 - protein, 21 aa, synthetic construct
LMYHKRLSQGTNLPTVIQLAD

SEQ ID NO: 42395 - protein, 14 aa, synthetic construct
FSRLGAHNLVSPTN

SEQ ID NO: 42396 - protein, 13 aa, synthetic construct
FARTSNGYFHPAN

SEQ ID NO: 42397 - protein, 11 aa, synthetic construct
FHKRLGIPSND

SEQ ID NO: 42398 - protein, 19 aa, synthetic construct
YLHAKRNAGQLSPLINDTN

SEQ ID NO: 42399 - protein, 37 aa, synthetic construct
AFHILNPRSTVYADEFGHIKLMNQRSTWYSSTNGIRV

SEQ ID NO: 42400 - protein, 17 aa, synthetic construct
FLYDEHNQSTSSTNGIV

SEQ ID NO: 42401 - protein, 30 aa, synthetic construct
VPISTHAADEFGHIKLMNQRSTYSSTNGIV

SEQ ID NO: 42402 - protein, 21 aa, synthetic construct
AFILPSTVYDENQSTSTSNGR

SEQ ID NO: 42403 - protein, 13 aa, synthetic construct
REDQDTSSTNGIV

SEQ ID NO: 42404 - protein, 30 aa, synthetic construct
RTLMSGDNEGEDIFHSAMPVYDAVSTYFAP

SEQ ID NO: 42405 - protein, 20 aa, synthetic construct
RTMLSYSAMIFPDAVSTYFP

SEQ ID NO: 42406 - protein, 19 aa, synthetic construct
RTMSYSAMIFPDAVSTYFA

SEQ ID NO: 42407 - protein, 23 aa, synthetic construct
RGTDSNEEDPSGDTEHNVATYFP

SEQ ID NO: 42408 - protein, 19 aa, synthetic construct
RGLTDSDPSGDEHNVTYFP

SEQ ID NO: 42409 - protein, 17 aa, synthetic construct
TRKYWEWYQSTGDPAAP

SEQ ID NO: 42410 - protein, 22 aa, synthetic construct
LCKRPCLSDANQHPVETGADNS

SEQ ID NO: 42411 - protein, 27 aa, synthetic construct
YFWFYTSGITVQMHIPHLMAQTVASDE

SEQ ID NO: 42412 - protein, 20 aa, synthetic construct
YFWFYTSGITVQMHKRASDE

SEQ ID NO: 42413 - protein, 23 aa, synthetic construct
YFWFYTSGKRIPHLMAQTVASDE

SEQ ID NO: 42414 - protein, 17 aa, synthetic construct
YFTGKRQMNITRHKVLE

SEQ ID NO: 42415 - protein, 20 aa, synthetic construct
YFTSHAGKRTIPHLMAQTDN

SEQ ID NO: 42416 - protein, 18 aa, synthetic construct
YWTGKMVTPVIHQTMLED

SEQ ID NO: 42417 - protein, 20 aa, synthetic construct
YFFSHAQGKQRIVLKHRQME

SEQ ID NO: 42418 - protein, 19 aa, synthetic construct
KRDSNEFTKSRVTSGVFWY

SEQ ID NO: 42419 - protein, 18 aa, synthetic construct
KRDDFYTSVHTSGVAFWY

SEQ ID NO: 42420 - protein, 18 aa, synthetic construct
SRGNTMQDGTVSNYSKRW

SEQ ID NO: 42421 - protein, 23 aa, synthetic construct
RVDIQKMLGSEARQDRTASGKNW

SEQ ID NO: 42422 - protein, 27 aa, synthetic construct
DIEQVSKLMGPEASDQTSARDSETGAW

SEQ ID NO: 42423 - protein, 21 aa, synthetic construct
GESPGADEPNGHTSNVRKSWY

SEQ ID NO: 42424 - protein, 17 aa, synthetic construct
REDEPNGHTSNVRKSWY

SEQ ID NO: 42425 - protein, 21 aa, synthetic construct
GGSGESAPDTGSSSTHKRANW

SEQ ID NO: 42426 - protein, 22 aa, synthetic construct
VIRNDAGSLTSHGKREGWRADG

SEQ ID NO: 42427 - protein, 23 aa, synthetic construct
LMWFRWKTYDSGTPGSNARAPSY

SEQ ID NO: 42428 - protein, 21 aa, synthetic construct
PNKYFARKSPVARILSEEDML

SEQ ID NO: 42429 - protein, 7 aa, synthetic construct
NNSTRGG

SEQ ID NO: 42430 - protein, 7 aa, synthetic construct
GNSARNI

SEQ ID NO: 42431 - protein, 7 aa, synthetic construct
GNSVRDF

SEQ ID NO: 42432 - DNA, 19 bp, synthetic construct
  source 1..19: mol_type = other DNA; mol_type = other DNA
ccgtgacccaggacacctc

SEQ ID NO: 42433 - DNA, 23 bp, synthetic construct
  source 1..23: mol_type = other DNA; mol_type = other DNA
gccatcttaatgtcgcccttcag

SEQ ID NO: 42434 - protein, 39 aa, unidentified
NFAEKFKEAVKDYFAKFWDPAAEKLKEAVKDYFAKLWDC

SEQ ID NO: 42435 - protein, 14 aa, unidentified
FSRLGAHNLVSPTN

SEQ ID NO: 42436 - protein, 7 aa, unidentified
FSRLGXN

SEQ ID NO: 42437 - protein, 8 aa, unidentified
AHNLVSPT

SEQ ID NO: 42438 - DNA, 26 bp, synthetic construct
  source 1..26: mol_type = other DNA
gctatgggactattgctgtgatcgtc

SEQ ID NO: 42439 - DNA, 23 bp, synthetic construct
  source 1..23: mol_type = other DNA
ccaatataagcgacgtgctgcag

SEQ ID NO: 42440 - DNA, 21 bp, synthetic construct
  source 1..21: mol_type = other DNA
tgtggagatgaaactggctgc

SEQ ID NO: 42441 - DNA, 23 bp, synthetic construct
  source 1..23: mol_type = other DNA
agtgcaatagctgcaaagcagag

SEQ ID NO: 42442 - DNA, 22 bp, synthetic construct
  source 1..22: mol_type = other DNA
aacaagagcgtgaagctctctg

SEQ ID NO: 42443 - DNA, 19 bp, synthetic construct
  source 1..19: mol_type = other DNA
ctccaggaccccaggagtc

SEQ ID NO: 42444 - DNA, 25 bp, synthetic construct
  source 1..25: mol_type = other DNA
ggaaaacaagagtgtgaagctcacg

SEQ ID NO: 42445 - DNA, 20 bp, synthetic construct
  source 1..20: mol_type = other DNA
ggagagctgtccccacactg

SEQ ID NO: 42446 - DNA, 20 bp, synthetic construct
  source 1..20: mol_type = other DNA
cttcttctgcattacggggc

SEQ ID NO: 42447 - DNA, 20 bp, synthetic construct
  source 1..20: mol_type = other DNA
accacagtccatgccatcac

SEQ ID NO: 42448 - DNA, 20 bp, synthetic construct
  source 1..20: mol_type = other DNA
tccaccaccctgttgctgta

SEQ ID NO: 42449 - DNA, 23 bp, synthetic construct
  source 1..23: mol_type = other DNA
aagggacctttaccagtgatgtg

SEQ ID NO: 42450 - DNA, 21 bp, synthetic construct
  source 1..21: mol_type = other DNA
acttactctcgccttcctcgg

SEQ ID NO: 42451 - DNA, 21 bp, synthetic construct
  source 1..21: mol_type = other DNA
ctaacttgtttggtggggaac

SEQ ID NO: 42452 - DNA, 22 bp, synthetic construct
  source 1..22: mol_type = other DNA
cttcatctgcagccagtttcat

SEQ ID NO: 42453 - DNA, 27 bp, synthetic construct
  source 1..27: mol_type = other DNA
ctcgtgaggctggatctcaaaaagatg

SEQ ID NO: 42454 - DNA, 30 bp, synthetic construct
  source 1..30: mol_type = other DNA
caccaggtaaacaagtctaccgttcttatc

SEQ ID NO: 42455 - DNA, 27 bp, synthetic construct
  source 1..27: mol_type = other DNA
actgggtctaagttaccatttgactgc

SEQ ID NO: 42456 - protein, 7 aa, synthetic construct
YSRIGPN

SEQ ID NO: 42457 - protein, 7 aa, synthetic construct
YSRLNMN

SEQ ID NO: 42458 - protein, 7 aa, synthetic construct
YSRLNKD

SEQ ID NO: 42459 - protein, 7 aa, synthetic construct
YHRLSNN

SEQ ID NO: 42460 - protein, 181 aa, Homo sapiens
VIIVDKNGRLVYLVENPGGYVAYSKAATVTGKLVHANFGTKKDFEDLYTPVNGSIVIVRAGKITFAEKVANAESLNAIGVLIYMDQTKFPIVNAELSFFGHAHLGYGDPYTPGFPSFNHTQFPPSRSSGLPNIPVQTISRAAAEKLFGNMEGDCPSDWKTDSTCRMVTSESKNVKLTVSNV

SEQ ID NO: 42461 - protein, 181 aa, Macaca sp.
VIIVDKNGGLVYLVENPGGYVAYSKAATVTGKLVHANFGTKKDFEDLDSPVNGSIVIVRAGKITFAEKVANAESLNAIGVLIYMDQTKFPIVKADLSFFGHAHLGYGDPYTPGFPSFNHTQFPPSQSSGLPNIPVQTISRAAAEKLFGNMEGDCPSDWKTDSTCKMVTSENKSVKLTVSNV

SEQ ID NO: 42462 - protein, 181 aa, Callithrix sp.
VTITGTNSEFVYLVENPGGYVAYSQNATVTGKLVHANFGTEKDFEDLDSPVNGSLVIVRAGKITFAEKVANAESANAIGVLIYMDKTKFPIVDADVSFFGHAHLGYGDPYTPGFPSFNHTQFPPSRSSGLPNIPVQTISRAAARKLFENMEGDCPSDWKTDSSCRMVTSQNKSVKLSVSNV

SEQ ID NO: 42463 - protein, 19 aa, synthetic construct
MEFGLSWVFLVALFRGVQC
